(19) United States
(12) Patent Application Publication
(10) Pub. No.: US 2020/0362368 A1
(43) Pub. Date: Nov. 19, 2020

(54) METHODS OF REDOSING GENE THERAPY VECTORS

(71) Applicant: BIOMARIN PHARMACEUTICAL INC., Novato, CA (US)

(72) Inventors: Peter COLOSI, Fairfax, CA (US); Justin ISHIDA, San Rafael, CA (US); Silvia RAMIREZ, Windsor, CA (US)

(73) Assignee: BIOMARIN PHARMACEUTICAL INC., Novato, CA (US)

(21) Appl. No.: 15/931,180

(22) Filed: May 13, 2020

Related U.S. Application Data
(60) Provisional application No. 62/847,908, filed on May 14, 2019.

(51) Int. Cl. C12N 15/86; A61P 7/00

(52) U.S. Cl. CPC C12N 15/86; A61P 7/00; C12N 2750/14121; C12N 2750/14122; A61K 45/06; C12N 2750/14143; C12N 2830/008; C12N 2830/48; C12N 2830/85; C12N 2750/14142

(57) ABSTRACT

The present disclosure relates, in general, to methods for readministering, or redosing, a subject having undergone a first gene therapy regimen with a second, or subsequent, administration of a gene therapy regimen, wherein the first gene therapy vector and second gene therapy vector comprise different AAV capsids but carry a transgene or polynucleotide useful to treat the same disease or disorder.

### CROSS-REFERENCE TO RELATED APPLICATIONS

[0001] This application claims the benefit of U.S. Provisional Application No. 62/847,908, filed May 14, 2019, which is incorporated by reference herein in its entirety.

### REFERENCE TO SEQUENCE LISTING SUBMITTED ELECTRONICALLY

[0002] This application incorporates by reference a Computer Readable Form (CRF) of a Sequence Listing in ASCII text format submitted with this application, entitled “11808-459-999_SEQ_LISTING.txt”, was created on May 11, 2020, and is 1,065,489 bytes in size.

### FIELD OF DISCLOSURE

[0003] The present disclosure relates to methods for re-administration or redosing of gene therapy vectors, for example AAV vectors, in order to avoid the immune response to the initial vector, or to evade the immune response to the first AAV vector and enable therapeutic expression of a subsequent dose of AAV vector.

### BACKGROUND

[0004] Adeno-associated virus (AAV) is considered as one of the most promising viral vectors for human gene therapy. AAV has the ability to efficiently infect dividing as well as non-dividing human cells. The wild-type AAV viral genome integrates into a single chromosomal site in the host cell's genome, and most importantly, even though AAV is present in many humans it has not been associated with any disease. In view of these advantages, recombinant adeno-associated virus (rAAV) is being evaluated in numerous gene therapy clinical trials for a variety of different clinical indications.

[0005] Adeno-associated virus (AAV), a member of the Parvovirus family, is a small replication-deficient, nonenveloped, icosahedral virus with single-stranded linear DNA genomes of 4.7 kilobases (kb) to 6 kb. The nucleotide sequence of the AAV serotype 2 (AAV2) genome is presented in Srivastava et al., J. Virol., 45: 555-564 (1983) as corrected by Ruffing et al., J. Gen. Virol., 75: 3385-3392 (1994). The life cycle and genetics of AAV are reviewed in Muzyczka, Current Topics in Microbiology and Immunology, 158: 97-129 (1992).

[0006] AAV possesses unique features that make it attractive as a vector for delivering foreign DNA to cells, for example, in gene therapy and expressing therapeutic peptides/polypeptides and polynucleotides. AAV infection of cells in culture is non-cytopathic, and natural infection of humans and other animals is silent and asymptomatic. Moreover, AAV infects many mammalian cells allowing the possibility of targeting many different tissues in vivo. The AAV proviral genome is infectious as cloned DNA in plasmids which makes construction of recombinant genomes feasible. Furthermore, because the signals directing AAV replication, genome encapsidation and integration are contained within the ITRs of the AAV genome, some or all of the internal approximately 4.3 kb of the genome (encoding replication and structural capsid proteins, rep-cap) may be replaced with foreign DNA such as a gene cassette containing a promoter, a DNA of interest and a polyadenylation signal. The rep and cap proteins may be provided in trans. Another significant feature of AAV is that it is an extremely stable and hearty virus. It easily withstands the conditions used to inactivate adenovirus (56° to 65° C. for several hours), making cold preservation of rAAV-vectors less critical. AAV may even be lyophilized. Finally, AAV-infected cells are not resistant to superinfection.

[0007] One major challenge for a successful administration of AAV vector is to overcome the presence of neutralizing antibodies (immunoglobulins) (NAb) that have developed following exposure to wild-type AAV or AAV-based vectors. In both cases, the neutralizing serotype-specific antibodies directed towards the viral capsid proteins can reduce the efficiency of gene transfer with AAV of the same serotype. (Scallon et al., Blood. 107:1810-7, 2006; Hurlbut et al., Mol Ther. 18:1983-1994, 2010) AAV is commonly found in the environment and natural, pre-existing immunity such as neutralizing antibodies to many known AAV exists in the majority of the human population, including children (Fu et al., Hum Gene Ther Clin Dev. 28:187-196, 2017). Hence, the general consensus in the field is to avoid treating patients having NAb titers altogether. Thus, the current practice in the clinic with regard to pre-existing immunity involves the screening of human patients for exclusion should patients have neutralizing antibodies against the AAV capsid (Brimble et al. Expert Opin Biol Ther 2016, 16(1):79-92 and Boutin et al. Hum Gene Ther 2010, 21:704-712). Immunosuppressive regimens have been tried in order to reduce the formation of NAb upon first administration to allow for a second administration (Corti et al., Mol Ther-Meth Clin Dev (2014) 1, 14033; Mingozzi et al. Mol Ther vol. 20 no. 7, 1410-1416; McIntosh et al. Gene Ther 2012, 19, 78-85)). Furthermore, strategies have been suggested to overcome pre-existing antibodies which include plasma exchange and the use of immunosuppressive regimens (e.g. Chicoine et al., Mol Ther 2014, vol. 22 no. 2 338-347; Hurlbut et al. Mol Ther 2010, vol. 18 no. 11 1983-1984 and Mingozzi et al. Mol Ther vol. 20 no. 7, 1410-1416). These strategies have been tested in animal models obtaining limited success.

[0008] Another challenge for the AAV vector gene transfer platform is the durability of the effect. Despite the exciting results to date in human clinical gene therapy trials with AAV demonstrating durable expression at therapeutic levels when targeting tissues like the liver (George et al., N. Engl. J. Med. 377, 2215-2227 (2017); Manno et al., Nat. Med. 12, 342-347 (2006); Miesbach et al., Blood 131, 1022-1031 (2018); Nathwani et al., N. Engl. J. Med. 371, 1994-2004 (2014); Nathwani et al., N. Engl. J. Med. 365, 2357-2365 (2011); Rangarajan et al., N. Engl. J. Med. 377, 2519-2530 (2017)), motor neurons (Mendell et al., N. Engl. J. Med. 377, 1713-1722 (2017)), and the retina (Russell et al., Lancet 390, 849-860 (2017)), for many metabolic and degenerative diseases, treatment is critically needed early in life (Fagiuoli et al., J. Hepatol. 59, 595-612 (2013); Soriano et al., J. Pediatr. Gastroenterol. Nutr. 35(Suppl 1), S51-S54 (2002)), prior to the onset of irreversible tissue damage. However, because of their non-integrative nature, systemic gene therapy with AAV vectors in pediatric patients is expected to be limited by tissue proliferation associated with organ growth, which results in significant vector dilution over time (Bortolussi et al., Hum. Gene Ther. 25, 844-855 (2014); Ronzitti et al., Mol. Ther. Methods Clin. Dev. 3, 16049 (2016); Wang et al., Hum. Gene Ther. 23, 533-539 (2012)). Thus, maintaining the possibility to re-administer AAV is an important goal to achieve sustained therapeutic efficacy over time in pediatric patients. In addition, vector readministration in both pediatric and adult patients would be desirable to enable vector titration, to increase the proportion of patients that achieve therapeutic levels of the transgene expression, while avoiding supra-physiological transgene expression and potential toxicities associated with large vector doses (Hinderer et al., Hum. Gene Ther. 29, 285-298 (2018)).

[0009] However, vector immunogenicity represents a major limitation to re-administration of AAV vectors (Mingozzi et al., Annu Rev. Virol. 4, 511-534 (2017)). Persistent high-titer neutralizing antibodies (NAbs) are triggered following vector administration (Nathwani et al., N. Engl. J. Med. 371, 1994-2004 (2014)), which abolishes any benefit of repeated AAV-based treatments. In addition, experience in human trials has shown that induction of capsid-specific CD8+ T cell responses can lead to clearance of AAV vector-transduced cells (Manno et al., Nat. Med. 12, 342-347 (2006); Nathwani et al., N. Engl. J. Med. 371, 1994-2004 (2014); Nathwani et al., N. Engl. J. Med. 365, 2357-2365 (2011); Mingozzi et al., Nat. Med. 13, 419-422 (2007)).

[0010] Thus, there is a need in the art to enable the administration of rAAV gene therapy vectors in human patients that have, or may be suspected to have, AAV neutralizing antibodies. Furthermore, safe and effective strategies aimed at reducing AAV vector immunogenicity that allow for stable transgene expression and vector re-dosing are urgently needed.

### SUMMARY OF THE DISCLOSURE

[0011] The disclosure provides for methods of readministering or redosing subjects with a gene therapy vector, wherein the vector for the second or subsequent dosing event comprises a different AAV capsid than the first gene therapy AAV dosing regimen. It is hypothesized that use of first and second AAV vectors that have low capsid sequence homology to each other, and are phylogenetically distinct, will not be effected by the humoral immune response to the first AAV vector compared to readministration of the same gene therapy vector, thereby permitting better transduction efficiency and transgene expression in the subject.

[0012] Provided herein is a method of treating a subject with multiple doses of a recombinant adeno-associated virus (rAAV) vector, the method comprising administering to a subject a first rAAV vector comprising a transgene comprising a therapeutic molecule and a first capsid, and administering to a subject a second rAAV vector comprising a transgene comprising a therapeutic molecule and a second capsid, wherein the transgene in the second capsid comprises the same therapeutic molecule or a different therapeutic molecule.

[0013] In a specific embodiment, provided herein is a method of treating a subject with multiple doses of an rAAV vector, the method comprising: administering to a subject a first rAAV vector comprising a transgene comprising a therapeutic molecule and a first capsid, and administering to a subject a second rAAV vector comprising a transgene comprising a therapeutic molecule and a second capsid, wherein the transgene in the second rAAV vector comprises the same therapeutic molecule or a different therapeutic molecule as transgene in the first rAAV vector.

[0014] Also contemplated herein is a method of treating a disease or disorder in a subject in need thereof with multiple doses of a recombinant adeno-associated virus (rAAV) vector, the method comprising: administering to a subject a first rAAV vector comprising a transgene comprising a therapeutic molecule useful for treating the disease or disorder and a first capsid, and administering to a subject a second rAAV vector comprising a transgene comprising a therapeutic molecule useful for treating the disease or disorder and a second capsid, wherein the transgene in the second capsid comprises the same therapeutic molecule or a different therapeutic molecule useful to treat the disease or disorder.

[0015] In a specific embodiment, provided herein is a method of treating a disease or disorder in a subject in need thereof with multiple doses of an rAAV vector, the method comprising: administering to a subject a first rAAV vector comprising a transgene comprising a therapeutic molecule useful for treating the disease or disorder and a first capsid, and administering to a subject a second rAAV vector comprising a transgene comprising a therapeutic molecule useful for treating the disease or disorder and a second capsid, wherein the transgene in the second rAAV vector comprises the same therapeutic molecule or a different therapeutic molecule useful to treat the disease or disorder as the transgene in the first rAAV vector.

[0016] In various embodiments, the therapeutic molecule is a therapeutic protein, an inhibitory RNA, an mRNA, or a CRISPR/Cas guide polynucleotide. It is contemplated that the therapeutic molecule in the first capsid can be selected from a therapeutic protein, an inhibitory RNA, an mRNA, or a CRISPR/Cas guide polynucleotide. It is further contemplated that the therapeutic molecule in the second capsid is selected from a therapeutic protein, an inhibitory RNA, an mRNA, or a CRISPR/Cas guide polynucleotide.

[0017] In various embodiments, the first and second capsids are phylogenetically distinct. In various embodiments, the phylogenetic difference is based on a threshold level of sequence homology. In various embodiments, the threshold level of sequence homology is approximately less than or equal to 90% sequence homology over the capsid amino acid sequence, or over any one of the VP1, VP2 or VP3 capsid proteins. In various embodiments, the first and second capsids have amino acid sequence homology that is less than or equal to about 90%. In various embodiments, the first and second capsids have less than or equal to about 90% homology in a VP1 capsid protein, have less than or equal to about 90% homology in a VP2 capsid protein and/or less than or equal to about 90% homology in a VP3 capsid protein. In various embodiments, the sequence homology of the capsids, or capsid proteins, may be less than or equal to 90%, 89%, 88%, 87%, 86%, 85%, 84%, 83%, 82%, 81%, 80%, 79%, 78%, 77%, 76%, 75% or lower. In various embodiments, the sequence homology of the capsids, or capsid proteins, may be from about 30% to 90% homologous, from about 45% to 87% homologous, from about 40% to 86% homologous, from about 50% to 85% homologous, or from about 60% to 80% homologous, or from about 65% to 75% homologous.

[0018] In various embodiments, the first capsid and/or second capsid exhibit low pre-existing immunity in the subject. In a specific embodiment, a subject exhibits low pre-existing immunity to either the first capsid, the second capsid or both the first and second capsids. In some embodiments, an in vitro assay to measure neutralizing antibody to AAV capsid is used to determine if a subject exhibits pre-existing immunity to the first capsid, the second capsid, or both the first and second capsids

[0019] In various embodiments, the subject is human. In various embodiments, the subject is human and is immunologically naïve to the first and/or second AAV vector. In various embodiments, the subject has less than 1:2, 1:5, 1:10, 1:20, 1:50, 1:100, 1:200, 1:300, 1:400, 1:500 or 1:1000 neutralizing antibody to the first or second AAV vector in serum. In certain embodiments, the subject has less than 1:2, 1:5, or 1:10 anti-first AAV vector neutralizing antibody titer or less than 1:100 total anti-first AAV vector-IgG titer in a biological sample (e.g., blood, sera or plasma) from the subject. In certain embodiments, the subject has less than 1:2, 1:5, or 1:10 anti-second AAV vector neutralizing antibody titer or less than 1:100 total anti-second AAV vector-IgG titer. In some embodiments, the subject has less than 1:10, 1:20, 1:50, 1:80, 1:100, 1:200, 1:300, 1:400, or 1:500 total anti-first AAV vector-IgG titer in a biological sample (e.g., blood, sera or plasma) from the subject. In ceratin embodiments, the subject has less than 1:10 anti-second AAV vector neutralizing antibody titer or less than 1:10, 1:20, 1:50, 1:80, 1:100, 1:200, 1:300, 1:400, or 1:500 total anti-second AAV vector-IgG titer. In various embodiments, the neutralizing antibody levels are measured in a neutralizing antibody assay.

[0020] In various embodiments, the first capsid is selected from the group consisting of AAV1, AAV2, AAV3, AAV4, AAV5, AAV6, AAV7, AAV8, AAV9, AAV10, AAV11, AAV12, AAV13, AAV3b, LK03, rh74.j, rh10, AAVbo (also referred to herein as “bovine”), AAVGoat, Bba.41, Bba.47, Bba.49, Bba.33, Bba.45, Bba.46, Bba.50, Bba.51, RN35, Anc110_9 VR, AAV_go.1, AAVs listed in Table 4, AAV listed in Table 5, Table 6 and/or a variant thereof. In various embodiments, the second capsid is selected from the group consisting of AAV1, AAV2, AAV3, AAV4, AAV5, AAV6, AAV7, AAV8, AAV9, AAV10, AAV11, AAV12, AAV13, AAV3b, LK03, rh74.j, rh10, bovine, AAVGoat, Bba.41, Bba.47, Bba.49, Bba.33, Bba.45, Bba.46, Bba.50, Bba.51, RN35, Anc110_9 VR, AAV_go.1, AAVs listed in Table 4, AAV listed in Table 5, Table 6, and/or a variant thereof, wherein there is sufficient phylogenetic distance between the viruses that there is not significant cross-reactivity of any preexisting immunogenicity against the first capsid protein toward the second capsid protein.

[0021] In some embodiments, anti-first capsid protein antibody(ies) present in a biological sample (e.g., blood, sera or plasma) from a subject does not bind to the second capsid protein as assessed by techniques known in the art, e.g., ELISA, Western blot, biolayer interferometry, FACS or BIACore, or described herein. In certain embodiments, anti-first capsid antibody(ies) present in a biological sample (e.g., blood, sera or plasma) from a subject has a 5 fold, 10 fold, 15 fold, 20 fold, 25 fold or greater fold affinity for the first capsid protein than the second capsid protein as assessed by techniques known in the art, e.g., ELISA, Western blot, biolayer interferometry, FACS or BIACore, or described herein. In some embodiments, anti-second capsid protein antibody(ies) present in a biological sample (e.g., blood, sera or plasma) from a subject does not bind to the first capsid protein as assessed by techniques known in the art, e.g., ELISA, Western blot, biolayer interferometry, FACS or BIACore, or described herein. In certain embodiments, anti-second capsid antibody(ies) present in a biological sample (e.g., blood, sera or plasma) from a subject has a 5 fold, 10 fold, 15 fold, 20 fold, 25 fold or greater fold affinity for the second capsid protein than the first capsid protein as assessed by techniques known in the art, e.g., ELISA, Western blot, biolayer interferometry, FACS or BIACore, or described herein.

[0022] In some embodiments, anti-first rAAV vector antibody(ies) present in a sample (e.g., blood, sera or plasma) from a subject does not bind to the second rAAV vector as assessed by techniques known in the art, e.g., ELISA, Western blot, biolayer interferometry, flow cytometry or BIACore, or described herein. In certain embodiments, anti-first rAAV vector antibody(ies) present in a sample (e.g., blood, sera or plasma) from a subject has a 5-fold, 10-fold, 15-fold, 20-fold, 25-fold or greater-fold affinity for the first rAAV vector than the second rAAV vector as assessed by techniques known in the art, e.g., ELISA, Western blot, biolayer interferometry, flow cytometry or BIACore.

[0023] In some embodiments, anti-second rAAV vector antibody(ies) present in a sample (e.g., blood, sera or plasma) from a subject does not bind to the first rAAV vector as assessed by techniques known in the art, e.g., ELISA, Western blot, biolayer interferometry, flow cytometry or BIACore, or described herein. In certain embodiments, anti-second rAAV vector antibody(ies) present in a sample (e.g., blood, sera or plasma) from a subject has a 5-fold, 10-fold, 15-fold, 20-fold, 25-fold or greater-fold affinity for the second rAAV vector than the first rAAV vector as assessed by techniques known in the art, e.g., ELISA, Western blot, biolayer interferometry, flow cytometry or BIACore.

[0024] In various embodiments, the first capsid and/or second capsid is an engineered or chimeric capsid.

[0025] In various embodiments, the first or second capsid comprises a chimeric capsid protein having a VP1 amino acid sequence of a recipient backbone AAV capsid comprising variable regions I, II, III, IV, V, VI, VII, VIII and IX, except wherein one or more of variable regions I, II, III, IV, V, VI, VII, VIII, or IX is replaced by the corresponding variable region from one or more donor AAV capsids. In various embodiments, the one or more variable regions from the recipient AAV capsid is replaced by the corresponding variable region from the donor AAV capsid. In various embodiments, the recipient AAV capsid sequence is any one of SEQ ID NOS:1-89 or 158-164 and the donor AAV capsid sequences are selected from the group of sequences consisting of SEQ ID NOS:1-89 or 158-164, and the recipient AAV capsid sequence and the donor AAV capsid sequences are different. In various embodiments, the chimeric capsid protein comprises the amino acid sequence of any one of SEQ ID NOS:90-157 (see, e.g., Table 7, below).

[0026] In various embodiments, the first or second capsid comprises an amino acid sequence that is at least 95% identical to (i) any one of SEQ ID NOs:15-89 or 158-164, (ii) the VP2 region of any one of SEQ ID NOs: 15-89 or 158-164, or (iii) the VP3 region of any one of SEQ ID NOs: 15-89 or 158-164. In various embodiments, the first or second capsid protein comprises the amino acid sequence of (i) any one of SEQ ID NOS:15-89, (ii) the VP2 region of any one of SEQ ID NOS:15-89, or (iii) the VP3 region of any one of SEQ ID NOS:15-89.

[0027] In various embodiments, the first capsid protein comprises an amino acid sequence that is at least 95% identical to (i) any one of SEQ ID NOS:158-164, (ii) the VP2 region of any one of SEQ ID NOS: 158-164, or (iii) the VP3 region of any one of SEQ ID NOS: 158-164. In various embodiments, the first capsid protein comprises an amino acid sequence of (i) any one of SEQ ID NOS:158-164, (ii) the VP2 region of any one of SEQ ID NOS: 158-164, or (iii) the VP3 region of any one of SEQ ID NOS: 158-164.

[0028] In various embodiments, the second capsid protein comprises an amino acid sequence that is at least 95% identical to (i) any one of SEQ ID NOS:158-164, (ii) the VP2 region of any one of SEQ ID NOS: 158-164, or (iii) the VP3 region of any one of SEQ ID NOS: 158-164. In various embodiments, the second capsid protein comprises an amino acid sequence of (i) any one of SEQ ID NOS:158-164, (ii) the VP2 region of any one of SEQ ID NOS: 158-164, or (iii) the VP3 region of any one of SEQ ID NOS: 158-164.

[0029] In various embodiments, the first and second capsid proteins comprise an amino acid sequence that is at least 95% identical to (i) any one of SEQ ID NOS:158-164, (ii) the VP2 region of any one of SEQ ID NOS: 158-164, or (iii) the VP3 region of any one of SEQ ID NOS: 158-164. In various embodiments, the first and second capsid proteins comprise an amino acid sequence of (i) any one of SEQ ID NOS:158-164, (ii) the VP2 region of any one of SEQ ID NOS: 158-164, or (iii) the VP3 region of any one of SEQ ID NOS: 158-164.

[0030] In various embodiments, the vector comprises a nucleic acid sequence encoding an adeno-associated virus (AAV) capsid protein having an amino acid sequence that is at least 95% identical to (i) any one of SEQ ID NOS:15-89 or 158-164, (ii) the VP2 region of any one of SEQ ID NOS:15-89 or 158-164, or (iii) the VP3 region of any one of SEQ ID NOS:15-89 or 158-164. In various embodiments, the vector comprises a nucleic acid sequence encoding an adeno-associated virus (AAV) capsid protein having an amino acid sequence of (i) any one of SEQ ID NOS:15-89 or 158-164, (ii) the VP2 region of any one of SEQ ID NOS:15-89 or 158-164, or (iii) the VP3 region of any one of SEQ ID NOS:15-89 or 158-164. In some embodiments, the nucleic acid sequence is operably linked to a heterologous regulatory element that controls expression of the capsid protein in a host cell.

[0031] In various embodiments, the host cell is a liver cell or muscle cell.

[0032] In various embodiments, the first capsid and/or the second capsid is a muscle-targeting capsid. In particular embodiments, the muscle-targeting capsid is selected from the group consisting of Anc110_9 VR, Bba.26, Bba.41, Bba.42, Bba.43, and Bba.44. In specific embodiments, the muscle-targeting capsid is Bba.41. In various embodiments, the muscle-targeting capsid protein comprises an amino acid sequence that is at least 95% identical to (i) any one of SEQ ID NOS:16, 28, 29, 30, or 31, (ii) the VP2 region of any one of SEQ ID NOS:16, 28, 29, 30, or 31, or (iii) the VP3 region of any one of SEQ ID NOS:16, 28, 29, 30, or 31. In various embodiments, the muscle-targeting capsid comprises an amino acid sequence of (i) any one of SEQ ID NOS:16, 28, 29, 30, or 31, (ii) the VP2 region of any one of SEQ ID NOS:16, 28, 29, 30, or 31, or (iii) the VP3 region of any one of SEQ ID NOS:16, 28, 29, 30, or 31. In specific embodiments, the muscle-targeting capsid protein comprises an amino acid sequence of (i) SEQ ID NOS:28, (ii) the VP2 region of SEQ ID NO:28, or (iii) the VP3 region of SEQ ID NO:28.

[0033] In various embodiments, the first capsid and/or the second capsid is a liver-targeting capsid. In particular embodiments, the liver-targeting capsid is selected from the group consisting of Bba.45, Bba.46, Bba.47, Bba.48, Bba.49, Bba.50 and Bba.51. In specific embodiments, the liver-targeting capsid is Bba.47. In specific embodiments, the liver-targeting capsid is Bba.49. In various embodiments, the liver-targeting capsid protein comprises an amino acid sequence that is at least 95% identical to (i) any one of SEQ ID NOS:158-164, (ii) the VP2 region of any one of SEQ ID NOS:158-164, or (iii) the VP3 region of any one of SEQ ID NOS:158-164. In various embodiments, the liver-targeting capsid comprises an amino acid sequence of (i) any one of SEQ ID NOS:158-164, (ii) the VP2 region of any one of SEQ ID NOS:158-164, or (iii) the VP3 region of any one of SEQ ID NOS:158-164. In specific embodiments, the liver-targeting capsid protein comprises an amino acid sequence of (i) SEQ ID NOS:160, (ii) the VP2 region of SEQ ID NO:160, or (iii) the VP3 region of SEQ ID NO:160. In specific embodiments, the liver-targeting capsid protein comprises an amino acid sequence of (i) SEQ ID NOS:162, (ii) the VP2 region of SEQ ID NO:162, or (iii) the VP3 region of SEQ ID NO:162.

[0034] In various embodiments, the first or second capsid is selected from the group consisting of AAV5, Bba.49, Bba.47 and bovine. In various embodiments, the first capsid is selected from the group consisting of AAV5, Bba.49, Bba.47 and bovine and the second capsid is selected from the group consisting of AAV5, Bba.49, Bba.47 and bovine. In various embodiments, the first or second capsid is selected from the group consisting of LK03, AAV5, Bba.49 and bovine. In various embodiments, the first capsid is selected from the group consisting of LK03, AAV5, Bba.49 and bovine, and the second capsid is selected from the group consisting of LK03, AAV5, Bba.49 and bovine. In various embodiments, the first capsid or second capsid is selected from the group consisting of rh10, AAV5, Bba.49 and bovine. In various embodiments, the first capsid is selected from the group consisting of Rh10, AAV5, Bba.49 and bovine, and the second capsid is selected from the group consisting of rh10, AAV5, Bba.49 and bovine. In various embodiments, the first or second capsid is selected from the group consisting of AAV8, AAV5, Bba.49 and bovine. In various embodiments, the first capsid is selected from the group consisting of AAV8, AAV5, Bba.49 and bovine, and the second capsid is selected from the group consisting of AAV8, AAV5, Bba.49 and bovine. In various embodiments, the first capsid or second capsid is selected from the group consisting of AAV9 and Bba.41. In various embodiments, the first capsid is selected from the group consisting of AAV9 and Bba.41 and the second capsid is selected from the group consisting of AAV9 and Bba.41.

[0035] In various embodiments, the heterologous protein expressed by the transgene in the subject is maintained at a therapeutically effective level.

[0036] In various embodiments, the heterologous protein is selected from the group consisting of Factor VIII, Factor IX, ATP7B protein, C1 esterase inhibitor (C1-INH), alpha 1 antitrypsin, and galactose-1-phosphate uridyl transferase (GALT), dystrophin, a mini-dystrophin, microdystrophin, phenylalanine hydroxylase (PAH), alpha-galactosidase A, and glucocerebrosidase.

[0037] In various embodiments, expression of the heterologous protein is sufficient to treat a disorder or disease selected from the group consisting of hemophilia A, hemophilia B, Wilson's disease, hereditary angioedema (HAE), alpha 1 antitrypsin deficiency, galactosemia, Duchenne's Muscular Dystrophy or other muscular dystrophies, phenylketonuria (PKU), Fabry Disease, and Gaucher Disease. In various embodiments, the method involves delivering a transgene to a muscle cell or liver cell.

[0038] In various embodiments, the method utilizes a first capsid and/or a second capsid that is a muscle-targeting capsid. In particular embodiments, the method utilize a muscle-targeting capsid that is selected from the group consisting of Anc110_9 VR, Bba.26, Bba.41, Bba.42, Bba.43, and Bba.44. In specific embodiments, the method utilizes a Bba.41 muscle-targeting capsid. In various embodiments, the method utilizes a muscle-targeting capsid protein that comprises an amino acid sequence that is at least 95% identical to (i) any one of SEQ ID NOS:16, 28, 29, 30, or 31, (ii) the VP2 region of any one of SEQ ID NOS:16, 28, 29, 30, or 31, or (iii) the VP3 region of any one of SEQ ID NOS:16, 28, 29, 30, or 31. In various embodiments, the method utilizes a muscle-targeting capsid that comprises an amino acid sequence of (i) any one of SEQ ID NOS:16, 28, 29, 30, or 31, (ii) the VP2 region of any one of SEQ ID NOS:16, 28, 29, 30, or 31, or (iii) the VP3 region of any one of SEQ ID NOS:16, 28, 29, 30, or 31. In specific embodiments, the method utilizes a muscle-targeting capsid protein comprises an amino acid sequence of (i) SEQ ID NOS:28, (ii) the VP2 region of SEQ ID NO:28, or (iii) the VP3 region of SEQ ID NO:28. In various embodiments, the method utilizes a first capsid and/or a second capsid that is a liver-targeting capsid. In particular embodiments, the method utilizes a liver-targeting capsid that is selected from the group consisting of Bba.45, Bba.46, Bba.47, Bba.48, Bba.49, Bba.50 and Bba.51. In specific embodiments, the method utilizes a Bba.47 liver-targeting capsid. In specific embodiments, the method utilizes a Bba.49 liver-targeting capsid. In various embodiments, the method utilizes a liver-targeting capsid protein that comprises an amino acid sequence that is at least 95% identical to (i) any one of SEQ ID NOS:158-164, (ii) the VP2 region of any one of SEQ ID NOS:158-164, or (iii) the VP3 region of any one of SEQ ID NOS:158-164. In various embodiments, the method utilizes a liver-targeting capsid that comprises an amino acid sequence of (i) any one of SEQ ID NOS:158-164, (ii) the VP2 region of any one of SEQ ID NOS:158-164, or (iii) the VP3 region of any one of SEQ ID NOS:158-164. In specific embodiments, the method utilizes a liver-targeting capsid protein that comprises an amino acid sequence of (i) SEQ ID NOS:160, (ii) the VP2 region of SEQ ID NO:160, or (iii) the VP3 region of SEQ ID NO:160. In specific embodiments, the method utilizes a liver-targeting capsid protein that comprises an amino acid sequence of (i) SEQ ID NOS:162, (ii) the VP2 region of SEQ ID NO:162, or (iii) the VP3 region of SEQ ID NO:162.

[0039] In various embodiments, the subject is administered an immunosuppressant, prior to or subsequent to administration of the second gene therapy vector. In various embodiments, the immunosuppressant is selected from the group consisting of T cell inhibitors, calcineurin inhibitors, mTOR inhibitor and steroids. In various embodiments, the immunosuppressant is anti-thymocyte globulin (ATG), tacrolimus, cyclosporine, mycophenolate mofetil, mycophenolate sodium, azathioprine, sirolimus (rapamycin), or prednisone. In various embodiments, the immunosuppressant is delivered via a delivery vehicle, such as a liposome or nanoparticle.

[0040] In various embodiments, the subject is administered intravenous immunoglobulins (IVIG) prior to or subsequent to administration of the second gene therapy vector.

[0041] In various embodiments, the second gene therapy vector is administered 6 months, 1 year, 1.5 year, 2 years, 2.5 years, 3 years, 4 years, 5 years or 6 years or more after the first administration of the first gene therapy vector.

[0042] The disclosure also contemplates use of an adeno-associated virus (AAV) having a capsid protein having an amino acid sequence that is at least 95% identical to (i) any one of SEQ ID NOs: 15-89 or 158-164, (ii) the VP2 region of any one of SEQ ID NOs: 15-89 or 158-164, or (iii) the VP3 region of any one of SEQ ID NOs: 15-89 or 158-164, and further having a transgene where the transgene is composed of a heterologous gene operably linked to regulatory sequences that control expression of the heterologous gene in a host cell. In another embodiment the capsid protein has the amino acid sequence of (i) any one of SEQ ID NOs: 15-89 or 158-164, (ii) the VP2 region of any one of SEQ ID NOs: 15-89 or 158-164, or (iii) the VP3 region of any one of SEQ ID NOs: 15-89 or 158-164. In yet another embodiment, the AAV has an AAV inverted terminal repeat sequence. In further embodiments, the AAV are mixed with a physiologically compatible carrier.

[0043] In various embodiments, the disclosure provides for use of an isolated adeno-associated virus (AAV) capsid protein in the methods, wherein the capsid protein comprises (i) an amino acid sequence that is at least 95%, 96%, 97%, 98%, or 99% identical to the VP1 amino acid sequence of any one of SEQ ID NOS: 15-89 or 158-171 or the VP2 or VP3 region of any one of SEQ ID NOS: 15-89 or 158-164 or (ii) a VP1 amino acid sequence comprising any one of SEQ ID NOS: 15-89 or 158-164 or the VP2 or VP3 region of any one of SEQ ID NOS: 15-89 or 158-164. In certain embodiments, the capsid protein is linked to a heterologous amino acid sequence. The disclosure also provides for non-naturally occurring AAV particles having or comprising any of these capsid proteins. In certain embodiments, the non-naturally occurring AAV particle comprising any of the above described VP1, VP2 or VP3 capsid proteins comprises a nucleic acid having AAV inverted terminal repeats and a transgene comprising a heterologous gene operably linked to regulatory sequences which direct expression of the heterologous gene in a host cell. In other embodiments, the non-naturally occurring AAV particle comprising any of the VP1, VP2 or VP3 capsid sequences described herein comprises a heterologous transgene operably linked to regulatory sequences that control transgene expression in a host cell. As used herein, the terms “heterologous gene” or “heterologous regulatory sequence” means that the referenced gene or regulatory sequence is not naturally present in the AAV vector or particle and is artificially introduced therein. The term “transgene” refers to a nucleic acid that comprises both a heterologous gene and regulatory sequences that are operably linked to the heterologous gene that control expression of that gene in a host cell. It is contemplated that the transgene herein comprises a therapeutic molecule, which can be a therapeutic protein, a therapeutic RNA, an inhibitory RNA (RNAi), mRNA, micro RNA, or a CRISPR/Cas guided endonuclease system.

[0044] The disclosure also provides for use of a polynucleotide comprising a nucleotide sequence encoding an adeno-associated virus (AAV) capsid protein, wherein the capsid protein comprises (i) an amino acid sequence that is at least 95%, 96%, 97%, 98% or 99% identical to the VP1 amino acid sequence of any one of SEQ ID NOS: 15-89 or 158-164 or the VP2 or VP3 region of any one of SEQ ID NOS: 15-89 or 158-164 or (ii) a VP1 amino acid sequence comprising any one of SEQ ID NOS: 15-89 or 158-164 or the VP2 or VP3 region of any one of SEQ ID NOS: 15-89 or 158-164, wherein the polynucleotide is operatively linked to a heterologous regulatory control sequence. As such, it is understood that the polynucleotides of described herein are non-naturally occurring. The disclosure also provides for AAV vectors comprising any of these polynucleotide sequences operably linked to a heterologous regulatory sequence and compositions comprising these AAV vectors, including pharmaceutical compositions.

[0045] In another embodiment, the disclosure provides an isolated adeno-associated virus (AAV) vector comprising a polynucleotide sequence encoding a capsid protein and a heterologous transgene sequence, wherein the capsid protein comprises (i) an amino acid sequence that is at least 95%, 96%, 97%, 98% or 99% identical to the VP1 amino acid sequence of any one of SEQ ID NOS: 15-89 or 158-164 or the VP2 or VP3 region of any one of SEQ ID NOS: 158-164 or (ii) a VP1 amino acid sequence comprising any one of SEQ ID NOS: 15-89 or 158-164 or the VP2 or VP3 region of any one of SEQ ID NOS: 15-89 or 158-164. The disclosure also provides for compositions comprising these AAV vectors, including pharmaceutical compositions.

[0046] In various embodiments, the amino acid sequences of mammalian-derived AAV capsid VP1 proteins useful in the methods herein are set out as SEQ ID NOS:15-89 or 158-164, and the associated locations of the respective VP2 and VP3 sequences are also herein described. In addition, the disclosure provides for novel engineered chimeric AAV capsid proteins which have a backbone amino acid sequence derived from one AAV capsid sequence and fragments of capsid protein sequence derived from at least one different AAV capsid sequence. The amino acid sequences of exemplary engineered chimeric AAV capsid VP1 proteins are set out as SEQ ID NOS: 90-157. Collectively, the capsid proteins are referred to herein as “AAV capsid proteins.” The term “non-naturally occurring” when used in regards to any composition of matter described herein means that the composition is not a product of nature, but rather is artificially synthesized by recombinant or other means. The term “non-naturally occurring” when used in regards to any composition of matter described herein means that the composition is not a product of nature, but rather is artificially synthesized by recombinant or other means.

[0047] In another embodiment the disclosure provides for use of a vector and an AAV having a chimeric capsid protein where the chimeric capsid protein has a VP1 amino acid sequence of a recipient backbone AAV capsid having variable regions I, II, III, IV, V, VI, VII, VIII, and IX, except where one or more of the variable regions I, II, III, IV, V, VI, VII, VIII, and IX is replaced by the corresponding variable region from one or more donor AAV capsids. In another embodiment, only one variable region of the recipient capsid is replaced by the corresponding variable region from the donor capsid. In a further embodiment, two or more variable regions of the recipient capsid are replaced by the corresponding variable regions from a single donor AAV capsid. In yet another embodiment, two or more variable regions of the recipient AAV capsid are replaced by the corresponding variable regions from two or more donor AAV capsids. In another embodiment, all nine variable regions of the recipient AAV capsid are replaced by the corresponding variable regions from a single donor capsid. In yet another embodiment the recipient AAV capsid has a GBS region or a GH loop region and the GBS region or the GH loop region is replaced by the corresponding region from one or more donor AAV capsids. In a further embodiment all nine variable regions and the GBS region of the recipient AAV capsid are replaced by the corresponding variable regions and GBS region from one or more donor AAV capsids. In yet another embodiment all nine variable regions and the GBS region of the recipient AAV capsid are replaced by the corresponding regions and GBS region from two or more donor AAV capsids. In another embodiment the GH loop of the recipient AAV capsid is replaced by the corresponding GH loop region from a donor AAV capsid. In a further embodiment all nine variable regions and the GH loop region of the recipient AAV capsid are replaced by the corresponding variable regions and GH loop region from one or more donor AAV capsids. In one embodiment the recipient AAV capsid sequence is any one of SEQ ID NOS:1-14 and the donor AAV capsid sequences are selected from any one of SEQ ID NOS:1-14 and where the recipient AAV capsid and the donor AAV capsid are different. In another embodiment the recipient AAV capsid sequence is any one of SEQ ID NOS:1-89 or 158-164 and the donor AAV capsid sequences are selected from any one of SEQ ID NOS:1-89 or 158-164 and where the recipient AAV capsid and the donor AAV capsid are different. In yet another embodiment the chimeric capsid has the amino acid sequence of any one of SEQ ID NOS:90-157.

[0048] In another embodiment, the disclosure provides a method of delivering a transgene to a cell involving the step of contacting the cell with any AAV disclosed herein. In another embodiment, the disclosure provides a method of treating a subject from a disorder or disease associated with abnormal activity of an endogenous protein involving the step of administering to the subject an effective amount of an AAV disclosed herein where the AAV has a transgene that encodes a biologically active copy of the protein, or a transgene that provides a therapeutic polynucleotide such as a mRNA, inhibitory RNA, micro RNA or CRISPR/CAs guide polynucleotide.

[0049] In an embodiment, the disclosure provides for use of a composition comprising a vector or AAV disclosed herein for delivery of a transgene to a cell. In another embodiment, the disclosure provides for use of a composition comprising an effective amount of a vector or AAV disclosed herein for the treatment of a disorder or disease associated with abnormal activity of an endogenous protein, wherein the vector of AAV has a transgene that encodes a biologically active copy of a protein useful for treating the disease or disorder, or a transgene that provides a therapeutic polynucleotide such as a mRNA, inhibitory RNA, micro RNA or CRISPR/CAs guide polynucleotide. In certain embodiments, the composition delivers a transgene to a muscle cell or liver cell.

[0050] The disclosure also provides for use of a vector or AAV disclosed herein for the preparation of a medicament effective to treat a subject suffering from a disorder or disease associated with abnormal activity of an endogenous protein, wherein the vector or AAV has a transgene that encodes a biologically active copy of the protein as described herein, or a transgene that provides a therapeutic polynucleotide such as a mRNA, inhibitory RNA, micro RNA or CRISPR/CAs guide polynucleotide. In yet another embodiment, the medicament delivers a transgene to a muscle cell or liver cell. In various embodiments, the medicament is useful for redosing a gene therapy vector to treat a disease or disorder set out herein, e.g., hemophilia A, hemophilia B, Wilson's disease, hereditary angioedema (HAE), alpha 1 antitrypsin deficiency, galactosemia, Duchenne's Muscular Dystrophy or other muscular dystrophies, phenylketonuria (PKU), Fabry Disease, and Gaucher Disease.

[0051] The disclosure provides for use of fragments of any of the AAV capsid proteins disclosed herein that retain a biological activity of an AAV capsid protein. Exemplary fragments include VP2 and VP3 spliced variants of the capsid proteins, and fragments comprising one or more of the variable regions (VR) of the capsid protein and/or the glycan binding sequence (GBS) of a capsid protein and/or the GH loop. The disclosure also provides for novel, non-naturally occurring AAV particles comprising a capsid protein fragment and those comprising a capsid protein fragment having at least 90, 91, 92, 93, 94, 95, 96, 97, 98 or 99% sequence identity to a specifically defined capsid protein fragment.

[0052] Also useful in the methods is the use of chimeric AAV for delivery of and redosing of a gene therapy vector to a subject. AAV VP1 capsid sequences comprise nine different variable regions, a GBS region and a GH loop region, and replacing one of more of these regions in one AAV VP1 capsid sequence with the corresponding region(s) from an at least second, different AAV VP1 capsid sequence can generate chimeric AAV capsids whose associated AAVs are functional, are capable of transducing cells and delivering heterologous transgenes, and that have unique properties that may be recombinantly engineered into the chimeric AAV. In regards to the various variable regions and the GBS and GH loop regions, the term “corresponding” means the same region between two different AAV capsid sequences. For example, the region “corresponding” to VR I in a first AAV capsid sequence is the same region (i.e., the VR I region) in a second different AAV capsid sequence. The term “chimeric” in relation to an AAV capsid sequence refers to the fact that the AAV capsid sequence of interest comprises amino acid sequences derived from two or more different AAV capsid sequences.

[0053] As such, the present disclosure also provides for use of an isolated, non-naturally occurring chimeric adeno-associated virus (AAV) capsid protein, wherein the chimeric capsid protein comprises an amino acid sequence derived from a first AAV capsid sequence having at least one variable region substituted with a variable region from a second AAV capsid sequence that is different from the first AAV capsid sequence. The first AAV capsid sequence (referred to herein as the “recipient”) provides the backbone amino acid sequence into which one or more variable regions are swapped or substituted by one or more variable regions from the second AAV capsid sequence (referred to herein as the “donor”). The second AAV capsid sequence is different from the first AAV capsid sequence and will provide the sequence of the variable region(s) which is/are substituted or inserted into the sequence of the backbone or recipient capsid sequence. The disclosure also provides for non-naturally occurring AAV virus or AAV particles that comprise any of the chimeric capsid proteins herein described. In certain embodiments, the non-naturally occurring AAV particles that comprise any of the chimeric capsid proteins herein described also comprise a heterologous transgene operably linked to regulatory sequences that control transgene expression in a host cell.

[0054] The “variable regions” refer to the nine variable regions within the VP1 sequence of an AAV capsid protein. Optionally, the variable region may be swapped from a donor AAV capsid sequence into a recipient backbone capsid sequence. The variable regions (VR) are referred to herein as VR I, VR II, VR III VR IV, VR V, VR VI, VR VII, VR VIII and VR IX and their respective locations in various VP1 sequences are herein described. The VR exhibit the highest sequence and structural variation within the AAV VP1 capsid sequence and may also have roles in receptor attachment, transcriptional activation of transgenes, tissue transduction and antigenicity.

[0055] The “glycan binding sequence (GBS)” or ‘GBS domain” or “GBS region” refer to the amino acid sequence located between VR IV and VR V that governs the glycan binding specificity of the viral capsid. The locations of the GBS regions in various AAV VP1 amino acid sequences are herein described, and those from other AAV VP1 amino acid sequences are known in the art and/or may be routine identified.

[0056] The “GH loop” refers to a loop sequence that is flanked by β-strand G and β-strand H within the internal β-barrel of the capsid protein. The “GH loop” sequence comprises variable region VR IV through VR VIII, including the encompassed GBS sequence and all interspersed conserved backbone sequence from the donor. The locations of the GH loop regions in various AAV VP1 amino acid sequences are herein described and those from other AAV VP1 amino acid sequences may be routinely identified.

[0057] In regard to the herein described locations of the VR, GBS and GH loop regions, it is noted that the location of the N-terminal and/or C-terminal ends of those regions may vary by from up to 1 amino acid, 2 amino acids, 3 amino acids, 4 amino acids or 5 amino acids from the amino acid locations of those regions as they are described herein (particularly in Table 4 or Table 5). Capsid sequence comprising substituted VR, GBS and/or GH loop region(s) that vary from up to 5 amino acids on the N-terminal and/or C-terminal end as herein defined are encompassed by the present disclosure.

[0058] In one embodiment, the disclosure provides for use of an isolated, non-naturally occurring, chimeric adeno-associated virus (AAV) capsid protein, wherein the chimeric capsid protein comprises an amino acid sequence derived from a first AAV capsid sequence having at least one variable region substituted by a variable region derived from an at least second different AAV capsid sequence. Additional disclosure of chimeric capsids contemplated for use in the methods are set out in the Detailed Description.

[0059] The disclosure further provides for methods of producing a recombinant adeno-associated virus (AAV) particle comprising the steps of: culturing a cell that has been transfected with any of the AAV vectors of the invention and recovering recombinant AAV particle from the supernatant of the transfected cell. In addition, the disclosure provides for viral particles comprising any of the viral vectors or capsid proteins of the invention and cells comprising these viral vectors.

[0060] One embodiment of the disclosure provides a method of producing any of the recombinant AAV described herein by culturing a viral production cell into which has been introduced a first nucleic acid vector having 5′ and 3′ AAV inverted terminal repeat sequences flanking a transgene having a heterologous gene operably linked to regulatory sequences that control expression of the heterologous gene in a host cell, and a second nucleic acid vector having AAV rep and cap nucleic acids sequences. In various embodiments, said cap nucleic acid sequence encodes an AAV capsid that is at least 95% identical to any of SEQ ID NOs: 15-164; and recovering the AAV from the supernatant of the viral production cell culture. In various embodiments, the viral production cell is a mammalian. In a preferred embodiment the mammalian cell is a HEK293 cell. In various embodiments the viral production cell is an insect cell. In a preferred embodiment the insect cell is an Sf9 cell.

[0061] In a further embodiment the first nucleic acid vector is introduced into the viral production cell by infection of the viral production cell by a baculovirus containing the first nucleic acid vector. In yet another embodiment the first and second nucleic acid vectors are introduced into the viral production cell by infection of the viral production cell by a first baculovirus containing the first nucleic acid vector and a second baculovirus containing the second nucleic acid vector. In further embodiments the invention AAV produced by the production methods provided herein.

[0062] In another embodiment, the disclosure provides for methods of treating a patient suffering from a disorder or disease comprising administering to the patient an effective amount of any of the AAV vectors or virus described herein.

[0063] In a further embodiment, the disclosure provides for use of any of the AAV vectors or virus of the invention for preparation of a medicament for the treatment of a disorder or disease. The invention also provides for compositions comprising any of the AAV vectors or virus of the invention for the treatment of a disease or disorder.

[0064] In yet another embodiment, the disease or disorder in a subject is associated with abnormal activity of an endogenous protein. As used herein “endogenous protein” means a protein or gene product encoded by the genome of the subject suffering from the disease or disorder.

[0065] An “AAV virion” or “AAV viral particle” or “AAV vector particle” or “AAV virus” refers to a viral particle composed of at least one AAV capsid protein and an encapsidated polynucleotide AAV vector. If the particle comprises a heterologous polynucleotide (i.e. a polynucleotide other than a wild-type AAV genome such as a transgene to be delivered to a mammalian cell), it is typically referred to as an “AAV vector particle” or simply an “AAV vector”. Thus, production of AAV vector particle necessarily includes production of AAV vector, as such a vector is contained within an AAV vector particle. As one of ordinary skill in the art would readily appreciate, any AAV referred to herein may be a recombinant AAV (rAAV).

[0066] The disclosure also provides for cells comprising any of the AAV vectors described herein, and viral particles produced by these cells.

[0067] The term “inverted terminal repeat (ITR)” as used herein refers to the art-recognized regions found at the 5′ and 3′ termini of the AAV genome which function in cis as origins of DNA replication and as packaging signals for the viral genome. AAV ITRs, together with the AAV rep coding region, provide for efficient excision and rescue from a plasmid vector, and integration of a nucleotide sequence interposed between two flanking ITRs into a host cell genome. Sequences of certain AAV-associated ITRs are disclosed by Yan et al., J. Virol. 79(1):364-379 (2005) which is herein incorporated by reference in its entirety.

[0068] The phrase “helper functions for generating a productive AAV infection” as used herein refers to AAV-derived coding sequences that can be expressed to provide AAV gene products that, in turn, function in trans for productive AAV replication. Thus, AAV helper functions include the rep and cap regions. The rep expression products have been shown to possess many functions, including, among others: recognition, binding and nicking of the AAV origin of DNA replication; DNA helicase activity; and modulation of transcription from AAV (or other heterologous) promoters. The cap expression products supply necessary packaging functions. AAV helper functions are used herein to complement AAV functions in trans that are missing from AAV vectors. Helper functions for generating a productive AAV infection also may include certain helper functions from baculovirus, herpes virus, adenovirus, or vaccinia virus.

[0069] In some embodiments, the viral construct comprises a nucleotide sequence encoding AAV rep and cap genes.

[0070] The term “AAV rep gene” as used herein refers to the art-recognized region of the AAV genome which encodes the replication proteins of the virus which are required to replicate the viral genome and to insert the viral genome into a host genome during latent infection. For a further description of the AAV rep coding region, see, e.g., Muzyczka et al., Current Topics in Microbiol. and Immunol. 158:97-129 (1992); Kotin et al., Human Gene Therapy 5:793-801 (1994), the disclosures of which are incorporated herein by reference in their entireties. The rep coding region, as used herein, can be derived from any viral serotype, such as the AAV serotypes described above. The region need not include all of the wild-type genes but may be altered, e.g., by the insertion, deletion or substitution of nucleotides, so long as the rep genes retain the desired functional characteristics when expressed in a suitable recipient cell.

[0071] The term “AAV cap gene” as used herein refers to the art-recognized region of the AAV genome which encodes the coat proteins of the virus which are required for packaging the viral genome. For a further description of the cap coding region, see, e.g., Muzyczka et al., Current Topics in Microbiol. and Immunol. 158:97-129 (1992); Kotin et al., Human Gene Therapy 5:793-801 (1994), the disclosures of which are incorporated herein by reference in their entireties. The AAV cap coding region, as used herein, can be derived from any AAV serotype, as described above. The region need not include all of the wild-type cap genes but may be altered, e.g., by the insertion, deletion or substitution of nucleotides, so long as the genes provide for sufficient packaging functions when present in a host cell along with an AAV vector.

[0072] The term “transfection” is used to refer to the uptake of foreign DNA by a cell. A cell has been “transfected” when exogenous DNA has been introduced inside the cell membrane. A number of transfection techniques are generally known in the art. See, e.g., Graham et al., Virology 52:456 (1973); Sambrook et al., Molecular Cloning: A Laboratory Manual, Cold Spring Harbor Laboratories, New York (1989); Davis et al., Basic Methods in Molecular Biology, Elsevier (1986); Chu et al., Gene 13:197 (1981), the disclosures of which are incorporated herein by reference in their entireties. Such techniques can be used to introduce one or more exogenous DNA moieties, such as a nucleotide integration vector and other nucleic acid molecules, into suitable host cells. The term captures chemical, electrical, and viral-mediated transfection procedures.

[0073] The viral construct is, in some embodiments, in the form of a baculoviral vector capable of productive transformation, transfection or infection in any cell type. In some embodiments, the viral construct comprises at least one nucleotide sequence encoding a heterologous protein.

[0074] In yet another aspect, described herein is an AAV particle produced by a method described herein. In some embodiments, the AAV particle comprises in its genome at least one nucleotide encoding a heterologous protein.

[0075] The term “heterologous proteins or peptides” refer to any protein that is not expressed by wild type AAV including tags such as hexahistidine, FLAG, myc, polyhistidine, or labels or immunogens, adjuvants, selection markers, therapeutic proteins or targeting proteins or peptides, to name a few.

[0076] Exemplary heterologous proteins described herein include, but are not limited to, β-globin, hemoglobin, tissue plasminogen activator, and coagulation factors; colony stimulating factors (CSF); interleukins, such as IL-1, IL-2, IL-3, IL-4, IL-5, IL-6, IL-7, IL-8, IL-9, etc.; growth factors, such as keratinocyte growth factor (KGF), stem cell factor (SCF), fibroblast growth factor (FGF, such as basic FGF and acidic FGF), hepatocyte growth factor (HGF), insulin-like growth factors (IGFs), bone morphogenetic protein (BMP), epidermal growth factor (EGF), growth differentiation factor-9 (GDF-9), hepatoma derived growth factor (HDGF), myostatin (GDF-8), nerve growth factor (NGF), neurotrophins, platelet-derived growth factor (PDGF), thrombopoietin (TPO), transforming growth factor alpha (TGF-α), transforming growth factor beta (TGF-β), and the like; soluble receptors, such as soluble TNF-α receptors, soluble interleukin receptors (e.g., soluble IL-1 receptors and soluble type II IL-1 receptors), soluble γ/Δ T cell receptors, ligand-binding fragments of a soluble receptor, and the like; enzymes, such as α-glucosidase, imiglucarase, β-glucocerebrosidase, and alglucerase; enzyme activators, such as tissue plasminogen activator; chemokines, such as 1β-10, monokine induced by interferon-gamma (Mig), Groa/IL-8, RANTES, MIP-1α, MIP-1β, MCP-1, PF-4, and the like; angiogenic agents, such as vascular endothelial growth factors (VEGFs, e.g., VEGF121, VEGF165, VEGF-C, VEGF-2), glioma-derived growth factor, angiogenin, angiogenin-2; and the like; anti-angiogenic agents, such as a soluble VEGF receptor; protein vaccine; neuroactive peptides, such as nerve growth factor (NGF), bradykinin, cholecystokinin, gastin, secretin, oxytocin, gonadotropin-releasing hormone, beta-endorphin, enkephalin, substance P, somatostatin, prolactin, galanin, growth hormone-releasing hormone, bombesin, dynorphin, warfarin, neurotensin, motilin, thyrotropin, neuropeptide Y, luteinizing hormone, calcitonin, insulin, glucagons, vasopressin, angiotensin II, thyrotropin-releasing hormone, vasoactive intestinal peptide, a sleep peptide, and the like; thrombolytic agents; atrial natriuretic peptide; relaxin; glial fibrillary acidic protein; follicle stimulating hormone (FSH); human alpha-1 antitrypsin; leukemia inhibitory factor (LIF); tissue factors, luteinizing hormone; macrophage activating factors; tumor necrosis factor (TNF); neutrophil chemotactic factor (NCF); tissue inhibitors of metalloproteinases; vasoactive intestinal peptide; angiogenin; angiotropin; fibrin; hirudin; IL-1 receptor antagonists; ciliary neurotrophic factor (CNTF); brain-derived neurotrophic factor (BDNF); neurotrophins 3 and 4/5 (NT-3 and 4/5); glial cell derived neurotrophic factor (GDNF); aromatic amino acid decarboxylase (AADC); Factor VIII, Factor IX, Factor X; dystrophin or nini-dystrophin; lysosomal acid lipase; phenylalanine hydroxylase (PAH); glycogen storage disease-related enzymes, such as glucose-6-phosphatase, acid maltase, glycogen debranching enzyme, muscle glycogen phosphorylase, liver glycogen phosphorylase, muscle phosphofructokinase, phosphorylase kinase, glucose transporter, aldolase A, β-enolase, glycogen synthase; and lysosomal enzymes.

[0077] It is understood that each feature or embodiment, or combination, described herein is a non-limiting, illustrative example of any of the aspects of the invention and, as such, is meant to be combinable with any other feature or embodiment, or combination, described herein. For example, where features are described with language such as “one embodiment”, “some embodiments”, “further embodiment”, “specific exemplary embodiments”, and/or “another embodiment”, each of these types of embodiments is a non-limiting example of a feature that is intended to be combined with any other feature, or combination of features, described herein without having to list every possible combination. Such features or combinations of features apply to any of the aspects of the disclosure. Where examples of values falling within ranges are disclosed, any of these examples are contemplated as possible endpoints of a range, any and all numeric values between such endpoints are contemplated, and any and all combinations of upper and lower endpoints are envisioned.

### BRIEF DESCRIPTION OF THE DRAWINGS

[0078] FIG. 1. In vitro transduction inhibition. This figure shows average pre-existing immunity to different AAV capsids in human subjects, as measured by neutralizing antibody levels in human intravenous immunoglobulin (IVIG). Human IVIG contains pooled IgG from 5000 individuals.

[0079] FIG. 2. In vitro transduction inhibition. This figures shows average pre-existing immunity to AAV2, AAV5 and AAV8 capsids compared to a novel isolate Bba.33 capsid in humans, as measured by neutralizing antibody levels in human IVIG.

[0080] FIG. 3 shows average pre-existing immunity to AAV12-like capsids compared to AAV5, AAV8 and AAV9 pre-existing immunity in humans, as measured by neutralizing antibody levels in human IVIG.

[0081] FIG. 4. This heat map illustrates the levels of pre-existing immunity to different capsids in 50 normal human donors, as measured by in vitro neutralizing titers.

[0082] FIG. 5 shows the levels of pre-existing neutralizing antibody titers of non-human primates (NHPs) to different AAV capsids. For each animal, the order of bar graphs, from left to right is Bba.41, AAV2, AAV8, Anc110_9 Vr, AAV9, AAV12 and AAV5.

[0083] FIG. 6 represents levels of neutralizing antibodies to Bba.49, in non-human primates(NHPs) pre/post-administration of an AAV5 vector. Bba.49 neutralizing titers measured 2 weeks prior to AAV5 administration (−2), 2 weeks post AAV5 administration, and 7 weeks post AAV5 administration.

[0084] FIG. 7 shows levels of neutralizing antibodies to AAV5 in NHPs, pre/post-administration of an AAV5 vector, measured 2 weeks prior to AAV5 administration (−2), 2 weeks post AAV5 administration and 7 weeks post AAV5 administration.

[0085] FIG. 8. Pre-existing Nab titer screening of NHPs for study selection; NC50 titers using a NAb neutralization assay. This figure shows levels of pre-existing neutralizing antibodies to AAV9, RN35 and Bba.41 AAV vectors in NHPs.

[0086] FIG. 9 illustrates levels of cross-reacting neutralizing antibodies to Bba.41 in NHPs dosed with AAV9, RN35 and Bba.41. Animals from the study summarized in FIG. 8 and the accompanying Example description were selected for use in this study. In particular, animals 1504447, 1504165 and 1410437 were dosed with Bba.49; animals 1505673, 1412911 and 1405945 were dosed with Rn35, and animals 1410197, 1502593 and 1410649 were dosed with AAV9.

[0087] FIG. 10 shows levels of cross-reacting neutralizing antibodies to AAV9 in NHPs dosed with AAV9, RN35, and Bba.41. Animals from the study summarized in FIG. 8 and the accompanying Example description were selected for use in this study. In particular, animals 1504447, 1504165 and 1410437 were dosed with Bba.49; animals 1505673, 1412911 and 1405945 were dosed with Rn35, and animals 1410197, 1502593 and 1410649 were dosed with AAV9.

[0088] FIG. 11 illustrates neutralizing titers to Bba.49 vector in serum from patients treated with AAV5-FVIII at approximately 1.5-2.5 yrs post-dose.

[0089] FIG. 12A-E illustrate neutralizing titers to AAV5, AAV2, AAV6, AAV8 and AAVrh10, respectively, in serum from patients treated with 6e13 vg/kg AAV5-FVIII, prior to AAV dosing, at 8 weeks and approximately 1.5-2.5 yrs post-dose.

[0090] FIG. 13A-E illustrate neutralizing titers to AAV5, AAV2, AAV6, AAV8 and AAVrh10, respectively, in serum from patients treated with 4e13 vg/kg AAV5-FVIII, prior to AAV dosing, at 8 weeks and at approximately 1.5-2.5 yrs post-dose.

[0091] FIG. 14 illustrates the phylogenetic differences between the AAV vectors and different clades of virus. AAV phylogenetic tree generated with PhyML using MSA input of VP3 sequences from MUSCLE.

[0092] FIG. 15A shows levels of bCG transgene expression in mice dosed initially with AAV5-bCG4, then with Bba.47--bCG or Bba.49-bCG four weeks after administration of AAV5-LUC. FIG. 15B shows levels of bCG transgene expression in mice dosed with AAV9-bCG or Bba.41-bCG 4 weeks after administration of AAV9-LUC.

[0093] FIG. 16 shows AAV capsid homology between different strains for the VP1 AAV capsid.

[0094] FIG. 17 shows AAV capsid homology between different strains for the VP3 AAV capsid.

### DETAILED DESCRIPTION

[0095] The disclosure provides for methods of readministration of, or redosing of, gene therapy vectors that minimize the immune response against the second administration of virus elicited by the subject receiving gene therapy. It is hypothesized that administration of a first AAV vector followed by administration of a second AAV vector that varies phylogenetically from the first vector will not be inhibited by any immune response to the first capsid, thereby permitting better transduction efficiency and transgene expression in the subject.

[0096] “Readministration” or “redosing” of a gene therapy vector refers to administration to a subject who has previously received at least one gene therapy vector administration to treat a disease or disorder, a second or subsequent administration of another, different gene therapy vector to treat the same disease or disorder. Redosing may refer to multiple doses, i.e., 2, 3, or more doses, of a gene therapy vector.

### AAV Vectors

[0097] As used herein, the term “AAV” is a standard abbreviation for adeno-associated virus. Adeno-associated virus is a single-stranded DNA parvovirus that grows only in cells in which certain functions are provided by a co-infecting helper virus. There are numerous serotypes of AAV that have been characterized, examples of which are shown below in Table 1. General information and reviews of AAV can be found in, for example, Carter, Handbook of Parvoviruses, Vol. 1, pp. 169-228 (1989), and Berns, Virology, pp. 1743-1764, Raven Press, (New York, 1990). However, it is fully expected that these same principles will be applicable to additional AAV serotypes since it is well known that the various serotypes are quite closely related, both structurally and functionally, even at the genetic level. (See, for example, Blacklowe, pp. 165-174 of Parvoviruses and Human Disease, J. R. Pattison, ed. (1988); and Rose, Comprehensive Virology 3:1-61 (1974)). For example, all AAV serotypes apparently exhibit very similar replication properties mediated by homologous rep genes; and all bear three related capsid proteins such as those expressed in AAV6. The degree of relatedness is further suggested by heteroduplex analysis which reveals extensive cross-hybridization between serotypes along the length of the genome; and the presence of analogous self-annealing segments at the termini that correspond to “inverted terminal repeat sequences” (ITRs). The similar infectivity patterns also suggest that the replication functions in each serotype are under similar regulatory control.

[0098] An “AAV vector” as used herein refers to a vector comprising one or more polynucleotides of interest (or transgenes, including encoding a therapeutic protein, RNAi, mRNA, CRISPR/Cas guide polynucleotides) that are flanked by AAV terminal repeat sequences (ITRs). Such AAV vectors can be replicated and packaged into infectious viral particles when present in a host cell that has been transfected with a vector encoding and expressing rep and cap gene products.

[0099] An “AAV virion” or “AAV viral particle” or “AAV vector particle” or “AAV virus” refers to a viral particle composed of at least one AAV capsid protein and an encapsidated polynucleotide AAV vector. If the particle comprises a heterologous polynucleotide (i.e. a polynucleotide other than a wild-type AAV genome such as a transgene to be delivered to a mammalian cell), it is typically referred to as an “AAV vector particle” or simply an “AAV vector”. Thus, production of AAV vector particle necessarily includes production of AAV vector, as such a vector is contained within an AAV vector particle.

[0100] AAV “rep” and “cap” genes are genes encoding replication and encapsidation proteins, respectively. AAV rep and cap genes have been found in all AAV serotypes examined to date, and are described herein and in the references cited. In wild-type AAV, the rep and cap genes are generally found adjacent to each other in the viral genome (i.e., they are “coupled” together as adjoining or overlapping transcriptional units), and they are generally conserved among AAV serotypes. AAV rep and cap genes are also individually and collectively referred to as “AAV packaging genes.” The AAV cap gene in accordance with the present disclosure encodes a Cap protein which is capable of packaging AAV vectors in the presence of rep and adeno helper function and is capable of binding target cellular receptors. In some embodiments, the AAV cap gene encodes a capsid protein having an amino acid sequence derived from a particular AAV serotype, for example the serotypes shown in Table 1.

TABLE 1
AAV serotypes

| AAV Serotype | Genbank Accession No. |
|---|---|
| AAV-1 | NC_002077.1 |
| AAV-2 | NC_001401.2 |
| AAV-3 | NC_001729.1 |
| AAV-3B | AF028705.1 |
| AAV-4 | NC_001829.1 |
| AAV-5 | NC_006152.1 |
| AAV-6 | AF028704.1 |
| AAV-7 | NC_006260.1 |
| AAV-8 | NC_006261.1 |
| AAV-9 | AX753250.1 |
| AAV-10 | AY631965.1 |
| AAV-11 | AY631966.1 |
| AAV-12 | DQ813647.1 |
| AAV-13 | EU285562.1 |

[0101] The AAV sequences employed for the production of AAV can be derived from the genome of any AAV serotype. The AAV serotype determines the tissue specificity of infection (or tropism) of an AAV virus. A “serotype” is traditionally defined on the basis of a lack of cross-reactivity between antibodies to one virus as compared to another virus. Such cross-reactivity differences are usually due to differences in capsid protein sequences/antigenic determinants (e.g., due to VP1, VP2, and/or VP3 sequence differences of AAV serotypes). Under the traditional definition, a serotype means that the virus of interest has been tested against serum specific for all existing and characterized serotypes for neutralizing activity and no antibodies have been found that neutralize the virus of interest. As more naturally-occurring virus isolates are discovered and capsid mutants generated, there may or may not be serological differences with any of the currently existing serotypes.

[0102] AAV may also be referred to in terms of clades or clones. This refers to the phylogenetic relationship of naturally derived AAVs, and typically to a phylogenetic group of AAVs which can be traced back to a common ancestor, and includes all descendants thereof. Additionally, AAVs may be referred to in terms of a specific isolate, i.e. a genetic isolate of a specific AAV found in nature. The term genetic isolate describes a population of AAVs which has undergone limited genetic mixing with other naturally occurring AAVs, thereby defining a recognizably distinct population at a genetic level.

[0103] The phylogenetic relationship, distance or similarity between AAVs can be determined, for example, using a Neighbor—Joining algorithm and a Poisson correction distance measurement, based on the alignment of AAV amino acid sequences. The Neighbor—Joining algorithm has been described in the literature. See, e.g., M. Nei and S. Kumar, Molecular Evolution and Phylogenetics (Oxford University Press, New York (2000). Computer programs are available that can be used to implement this algorithm. For example, the MEGA v2.1 program implements the modified Nei-Gojobori method. Using these techniques and computer programs, and the sequence of an AAV capsid protein, one of skill in the art can readily determine whether a selected AAV is contained in one of the clades identified herein, in another Glade, or is outside these clades. See, e.g., G Gao, et al, J Virol, 2004 June; 78(10): 6381-6388. See, also, WO 2005/033321. The sequence comparisons used to establish phylogenetic relationships between different naturally occurring AAV capsids can also be used to characterize and categorize engineered/synthetic AAV capsids.

[0104] The skilled person can select an appropriate serotype, Glade, clone or isolate of AAV for use in the invention on the basis of their common general knowledge.

[0105] Generally, the AAV serotypes have genomic sequences of significant homology at the amino acid and the nucleic acid levels, provide a similar set of genetic functions, produce virions which are essentially physically and functionally equivalent, and replicate and assemble by practically identical mechanisms. For the genomic sequence of AAV serotypes and a discussion of the genomic similarities see, for example, GenBank Accession number U89790; GenBank Accession number J01901; GenBank Accession number AF043303; GenBank Accession number AF085716; Chlorini et al., J. Vir. 71:6823-33(1997); Srivastava et al., J. Vir. 45:555-64 (1983); Chlorini et al., J. Vir. 73:1309-1319 (1999); Rutledge et al., J. Vir. 72:309-319 (1998); and Wu et al., J. Vir. 74: 8635-47 (2000).

[0106] The genomic organization of all known AAV serotypes is very similar. The genome of AAV is a linear, single-stranded DNA molecule that is less than about 5,000 nucleotides (nt) in length. Inverted terminal repeats (ITRs) flank the unique coding nucleotide sequences for the non-structural replication (Rep) proteins and the structural (VP) proteins. The VP proteins form the capsid. The terminal 145 nt are self-complementary and are organized so that an energetically stable intramolecular duplex forming a T-shaped hairpin may be formed. These hairpin structures function as an origin for viral DNA replication, serving as primers for the cellular DNA polymerase complex. The Rep genes encode the Rep proteins, Rep78, Rep68, Rep52, and Rep40. Rep78 and Rep68 are transcribed from the p5 promoter, and Rep 52 and Rep40 are transcribed from the p19 promoter. The cap genes encode the VP proteins, VP1, VP2, and VP3. The cap genes are transcribed from the p40 promoter.

[0107] In some embodiments, a nucleic acid sequence encoding an AAV capsid protein is operably linked to regulatory expression control sequences for expression in a specific cell type, such as Sf9 or HEK cells. Techniques known to one skilled in the art for expressing foreign genes in insect host cells or mammalian host cells can be used to practice the disclosure. Methodology for molecular engineering and expression of polypeptides in insect cells is described, for example, in Summers and Smith. A Manual of Methods for Baculovirus Vectors and Insect Culture Procedures, Texas Agricultural Experimental Station Bull. No. 7555, College Station, Tex. (1986); Luckow. 1991. In Prokop et al., Cloning and Expression of Heterologous Genes in Insect Cells with Baculovirus Vectors' Recombinant DNA Technology and Applications, 97-152 (1986); King, L. A. and R. D. Possee, The baculovirus expression system, Chapman and Hall, United Kingdom (1992); O'Reilly, D. R., L. K. Miller, V. A. Luckow, Baculovirus Expression Vectors: A Laboratory Manual, New York (1992); W. H. Freeman and Richardson, C. D., Baculovirus Expression Protocols, Methods in Molecular Biology, volume 39 (1995); U.S. Pat. No. 4,745,051; US2003148506; and WO 03/074714. A particularly suitable promoter for transcription of a nucleotide sequence encoding an AAV capsid protein is e.g. the polyhedron promoter. However, other promoters that are active in insect cells are known in the art, e.g. the p10, p35 or IE-1 promoters and further promoters described in the above references are also contemplated.

[0108] Use of insect cells for expression of heterologous proteins is well documented, as are methods of introducing nucleic acids, such as vectors, e.g., insect-cell compatible vectors, into such cells and methods of maintaining such cells in culture. See, for example, METHODS IN MOLECULAR BIOLOGY, ed. Richard, Humana Press, N J (1995); O'Reilly et al., BACULOVIRUS EXPRESSION VECTORS, A LABORATORY MANUAL, Oxford Univ. Press (1994); Samulski et al., J. Vir. 63:3822-8 (1989); Kajigaya et al., Proc. Nat'l. Acad. Sci. USA 88:4646-50 (1991); Ruffing et al., J. Vir. 66:6922-30 (1992); Kirnbauer et al., Vir. 219:37-44 (1996); Zhao et al., Vir. 272:382-93 (2000); and Samulski et al., U.S. Pat. No. 6,204,059. In some embodiments, the nucleic acid construct encoding AAV in insect cells is an insect cell-compatible vector. An “insect cell-compatible vector” or “vector” as used herein refers to a nucleic acid molecule capable of productive transformation or transfection of an insect or insect cell. Exemplary biological vectors include plasmids, linear nucleic acid molecules, and recombinant viruses. Any vector can be employed as long as it is insect cell-compatible. The vector may integrate into the insect cell's genome but the presence of the vector in the insect cell need not be permanent and transient episomal vectors are also included. The vectors can be introduced by any means known, for example by chemical treatment of the cells, electroporation, or infection. In some embodiments, the vector is a baculovirus, a viral vector, or a plasmid. In a more preferred embodiment, the vector is a baculovirus, i.e. the construct is a baculoviral vector. Baculoviral vectors and methods for their use are described in the above cited references on molecular engineering of insect cells.

[0109] Baculoviruses are enveloped DNA viruses of arthropods, two members of which are well known expression vectors for producing recombinant proteins in cell cultures. Baculoviruses have circular double-stranded genomes (80-200 kbp) which can be engineered to allow the delivery of large genomic content to specific cells. The viruses used as a vector are generally Autographa californica multicapsid nucleopolyhedrovirus (AcMNPV) or Bombyx mori (Bm)NPV) (Kato et al., Appl. Microbiol. Biotechnol. 85(3):459-470 (2010)). Baculoviruses are commonly used for the infection of insect cells for the expression of recombinant proteins. In particular, expression of heterologous genes in insects can be accomplished as described in for instance U.S. Pat. No. 4,745,051; Friesen et al., Curr. Top. Microbiol. Immunol. 131:31-49. (1986); EP 127,839; EP 155,476; Miller et al., Ann. Rev. of Microbiol. 42: 177-199 (1988); Carbonell et al., Gene 73(2):409-18 (1988); Maeda et al., Nature 315(6020):592-4 (1985); Lebacq-Verheyden et al., Mol. Cell. Biol. 8(8):3129-35 (1988); Smith et al., Proc. Natl. Acad. Sci. USA. 82(24):8404-8 (1985); Miyajima et al., Gene 58(2-3):273-81 (1987); and Martin et al., DNA 7(2):99-106 (1988). Numerous baculovirus strains and variants and corresponding permissive insect host cells that can be used for protein production are described in Luckow et al., Nature Biotechnology 6:47-55 (1988), and Maeda et al., Nature 315(6020):592-4 (1985).

### AAV Capsid Protein

[0110] In a first aspect, the disclosure provides for use of AAV capsid proteins that were isolated from various mammalian tissues. The AAV VP1 capsid proteins are provided as set out below and set out in SEQ ID NOs: 15-89 and 158-164 and the locations of the associated VP2 and VP3 regions are described herein.

[0111] The disclosure also provides for polynucleotides comprising a nucleotide sequence encoding these novel AAV capsid proteins. The disclosure provides the amino acid sequences of the novel AAV capsid proteins including the engineered chimeric capsid proteins described herein (referred herein collectively as the “AAV capsid proteins of the invention”), and the nucleic acid sequences encoding the AAV capsid proteins of the disclosure. Also provided are fragments of these AAV capsid nucleic acid and amino acid sequences of the disclosure. Each of these sequences may be readily utilized in a variety of vector systems and host cells. Desirable fragments of the capsid VP1 proteins include VP2, VP3 and variable regions, the GBS domain and the GH loop, and polynucleotide sequences encoding these proteins. These fragments may be readily utilized in a variety of vector systems and host cells. Such fragments may be used alone, in combination with other AAV sequences or fragments, or in combination with elements from other AAV or non-AAV viral sequences. In one particular embodiment, a vector contains the AAV capsid sequences described herein.

[0112] The AAV capsid sequences of the disclosure and fragments thereof are useful in production of rAAV, and are also useful as antisense delivery vectors, gene therapy vectors, or vaccine vectors. The disclosure further provides nucleic acid molecules, gene delivery vectors, and host cells which contain the novel AAV capsid sequences of the disclosure.

[0113] Suitable fragments can be determined using the information provided herein. “Sequence homology” can be determined by performing by alignment of two peptides or two nucleotide sequences using any of a variety of publicly or commercially available Multiple Sequence Alignment Programs, such as “Clustal W”, accessible through Web Servers on the internet. Alternatively, Vector NTI utilities are also used. There are also a number of algorithms known in the art which can be used to measure nucleotide sequence identity, including those contained in the programs described above. As another example, polynucleotide sequences can be compared using FASTA, a program in GCG Version 6.1. FASTA provides alignments and percent sequence identity of the regions of the best overlap between the query and search sequences. For instance, percent sequence identity between nucleic acid sequences can be determined using FASTA with its default parameters (a word size of 6 and the NOPAM factor for the scoring matrix) as provided in GCG Version 6.1, herein incorporated by reference. Similar programs are available for amino acid sequences, e.g., the “Clustal X” program. Additional sequence alignment tools that can be used are provided by (protein sequence alignment; (http://www.ebi.ac.uk/Tools/psa/emboss_needle/)) and (nucleic acid alignment; http://www.ebi.ac.uk/Tools/psa/emboss_needle/nucleotide.html)). Generally, any of these programs are used at default settings, although one of skill in the art can alter these settings as needed. Alternatively, one of skill in the art can utilize another algorithm or computer program which provides at least the level of identity or alignment as that provided by the referenced algorithms and programs.

[0114] The terms “substantial identity”, “substantial homology” or “substantial similarity,” when referring to a nucleic acid, or fragment thereof, indicates that, when optimally aligned with appropriate nucleotide insertions or deletions with another nucleic acid (or its complementary strand), there is nucleotide sequence identity in at least about 95 to 99% of the aligned sequences such as 95% identity, 96% identity, 97% identity, 98% identity and 99% identity. Preferably, the homology is over the full-length of the two sequences being compared, or an open reading frame thereof, or another suitable fragment which is at least 15 nucleotides in length. Examples of suitable fragments are described herein. Also included in the nucleic acid sequences of the disclosure are natural variants and engineered modifications of the nucleic acids encoding the AAV capsids of the disclosure and its complementary strand. Such modifications include, for example, labels which are known in the art, methylation, and substitution of one or more of the naturally occurring nucleotides with a degenerate nucleotide.

[0115] The terms “substantial identity”, “substantial homology” or “substantial similarity,” when referring to amino acids or fragments thereof, indicates that, when optimally aligned with appropriate amino acid insertions or deletions with another amino acid (or its complementary strand), there is amino acid sequence identity in at least about 95 to 99% of the aligned sequences such as 95% identity, 96% identity, 97% identity, 98% identity and 99% identity. Preferably, the homology is over the full-length of the two sequences being compared, or a protein thereof, e.g., the external surface or surface proteins, a cap protein, a rep protein, or a fragment thereof which is at least 8 amino acids, or more desirably, at least 15 amino acids in length. Examples of suitable fragments are described herein.

[0116] By the term “highly conserved” is meant at least 80% identity, preferably at least 90% identity, and more preferably, over 97% identity. Identity is readily determined by one of skill in the art by resort to algorithms and computer programs known by those of skill in the art.

[0117] The term “percent sequence identity” or “identical” in the context of nucleic acid sequences or amino acid sequences refers to the residues in the two sequences which are the same when aligned for maximum correspondence. The length of sequence identity comparison may be over the full-length of the two sequences being compared, the full-length of a gene coding sequence, or a fragment of at least about 500 to 5000 nucleotides, is desired. However, identity among smaller fragments, e.g. of at least about nine nucleotides, usually at least about 20 to 24 nucleotides, at least about 28 to 32 nucleotides, at least about 36 or more nucleotides, may also be desired. Similarly, “percent sequence identity” may be readily determined for amino acid sequences, over the full-length of a protein, or a fragment thereof. Suitably, a fragment is at least about 8 amino acids in length, and may be up to about 700 amino acids. Examples of suitable fragments are described herein.

[0118] As described herein, the vectors of the disclosure containing or comprising the AAV capsid proteins are particularly well-suited for use in applications in which the neutralizing antibodies diminish the effectiveness of other AAV serotype based vectors, as well as other viral vectors. The rAAV vectors of the disclosure are particularly advantageous in rAAV re-administration and repeat gene therapy.

[0119] Also included within the disclosure are fragments of the nucleic acids encoding the AAV capsid proteins of the disclosure, their complementary strand, cDNA and RNA complementary thereto. Suitable fragments are at least 15 nucleotides in length, and encompass functional fragments, i.e., fragments which are of biological interest. Such fragments include the sequences encoding the three variable proteins (VP) of the capsid which are alternative splice variants: VP1, VP2 and VP3. Other suitable fragments of the nucleic acids encoding the AAV capsids of the disclosure include the fragment which contains the start codon for the capsid protein, and the fragments encoding the variable regions of the VP1 capsid protein, which are described herein.

[0120] The disclosure is not limited to the AAV capsid amino acid sequences, peptides and proteins expressed from the AAV nucleic acid sequences of the disclosure and encompasses amino acid sequences, peptides and proteins generated by other methods known in the art, including, e.g., by chemical synthesis, by other synthetic techniques, or by other methods. For example, the sequences of any of the capsids described herein can be readily generated using a variety of techniques.

[0121] Suitable production techniques are well known to those of skill in the art. See, e.g., Sambrook et al, Molecular Cloning: A Laboratory Manual, Cold Spring Harbor Press (Cold Spring Harbor, N.Y.). Alternatively, peptides can also be synthesized by the well-known solid phase peptide synthesis methods (Merrifield, J. Am. Chem. Soc., 85:2149 (1962); Stewart and Young, Solid Phase Peptide Synthesis Freeman, (San Francisco, 1969) pp. 27-62. These and other suitable production methods are within the knowledge of those of skill in the art and are not a limitation of the present disclosure.

[0122] The AAV capsid is composed of three proteins, VP1, VP2 and VP3, which are alternative splice variants. The full-length capsid sequence is referred to as VP1 which encompasses the spliced variants referred to as VP2 and VP3. The disclosure also provides for other functional fragments of the AAV capsid proteins of the disclosure. Other desirable fragments of the capsid protein include the variable regions (VR), the constant regions which are located between the variable regions, the GBS domain, and the GH loop. Other desirable fragments of the capsid protein include the HPV themselves.

[0123] An algorithm has been developed to determine areas of sequence divergence in AAV2. (Chiorini et al, J. Virol, 73:1309-19 (1999); Rutledge et al, J. Virol., 72:309-319 (1998)). Using this algorithm and/or the alignment techniques described herein, the VR of the AAV capsid sequences are determined. Using the alignment provided herein performed using the Clustal X program at default settings, or using other commercially or publicly available alignment programs at default settings, one of skill in the art can readily determine corresponding fragments of the novel AAV capsids of the disclosure.

[0124] Suitably, fragments of an AAV capsid protein are at least 8 amino acids in length, or at least 9 amino acids in length, or at least 10 amino acids in length, or least 20 amino acids in length, or 30 amino acids in length or at least 50 amino acids in length, or at least 75 amino acids in length, or at least 100 amino acids in length or 200 amino acids in length or 250 amino acids in length or 300 amino acids in length or 350 amino acids in length or 400 amino acids in length. However, fragments of other desired lengths may be readily utilized. All fragments of the disclosure retain biological activity of a capsid AAV protein. Such fragments may be produced recombinantly or by other suitable means, e.g., chemical synthesis.

[0125] The sequences, proteins, and fragments of the disclosure may be produced by any suitable means, including recombinant production, chemical synthesis, or other synthetic means. Such production methods are within the knowledge of those of skill in the art and are not a limitation of the present disclosure.

[0126] In addition to including the nucleic acid sequences provided in the Sequence Listing, the present disclosure includes nucleic acid molecules and sequences which are designed to express the amino acid sequences, proteins and peptides of the AAV capsid proteins of the disclosure. Thus, the disclosure includes nucleic acid sequences which encode the following AAV capsid amino acid sequences and artificial AAV capsid proteins generated using these sequences and/or unique fragments thereof.

[0127] Artificial capsid or engineered capsid proteins may be generated by any suitable technique, using a AAV capsid protein sequence of the disclosure (e.g., a fragment of a VP1 capsid protein) in combination with heterologous sequences which may be obtained from another AAV serotype (known or novel), non-contiguous portions of the same AAV serotype, from a non-AAV viral source, or from a non-viral source. An artificial AAV serotype may be, without limitation, a chimeric AAV capsid, a recombinant AAV capsid, or a “humanized” AAV capsid.

### Chimeric AAV Capsid

[0128] In one embodiment, the method contemplates use of an isolated, non-naturally occurring, chimeric adeno-associated virus (AAV) capsid protein, wherein the chimeric capsid protein comprises an amino acid sequence derived from a first AAV capsid sequence having at least one variable region substituted by a variable region derived from an at least second different AAV capsid sequence. In certain embodiments, the non-naturally occurring capsid protein is a VP1 capsid protein. In other embodiments, the chimeric capsid protein further comprises a GBS domain and/or a GH loop region from an AAV capsid sequence differing from the first recipient AAV capsid sequence. For example, the chimeric AAV capsid proteins of the disclosure have a backbone sequence derived from a first AAV capsid sequence (recipient) and at least one substituted variable region from a second different AAV capsid sequence (donor). In certain embodiments, the chimeric AAV capsid proteins of the present disclosure have one, two, three, four, five, six, seven, eight or all nine variable regions substituted by the respective variable region(s) from one or more donor AAV capsid sequence(s) that differ from the first recipient capsid sequence. In other embodiments, the AAV capsid proteins of the disclosure have a GBS domain or GH loop region sequence derived from a donor capsid sequence that differs from the recipient capsid sequence. Alternatively, the chimeric AAV capsids of the disclosure have at least one substitute variable region and a GBS from the same AAV capsid sequence which differs from the first AAV capsid sequence. The disclosure also provides non-naturally occurring AAV particles comprising any of the chimeric AAV capsid proteins described herein. Such AAVs may also comprise a heterologous transgene operably linked to a regulatory sequence controlling expression of the transgene in a host cell.

[0129] In addition, the disclosure provides for use of isolated AAV capsid proteins, wherein the capsid protein comprises an amino acid sequence from a first AAV capsid sequence which has two variable regions substituted with the respective variable regions from at least one AAV capsid sequence that differs from the first AAV capsid sequence, or least three variable regions substituted with the respective variable regions from at least one AAV capsid sequence that differs from the first AAV capsid sequence, or least four variable regions substituted with the respective variable regions from at least one AAV capsid sequence that differs from the first AAV capsid sequence, or least five variable regions substituted with the respective variable regions from at least one AAV capsid sequence that differs from the first AAV capsid sequence, or least six variable regions substituted with the respective variable regions from at least one AAV capsid sequence that differs from the first AAV capsid sequence, or least seven variable regions substituted with the respective variable regions from at least one AAV capsid sequence that differs from the first AAV capsid sequence, or least eight variable regions substituted with the respective variable regions from at least one AAV capsid sequence that differs from the first AAV capsid sequence, or all nine of the variable regions substituted with the respective variable regions from at least one AAV capsid sequence that differs from the first AAV capsid sequence. For example, the substituted variable region(s) are from the same AAV capsid sequence or the substituted variable regions are from two or more different AAV capsid sequences that differ from the first AAV capsid sequence. In addition, in any of these AAV capsid proteins of the disclosure, the GBS and/or the GH loop are also substituted and may be derived from any AAV donor capsid sequence that differs from the first AAV capsid sequence.

[0130] In any of the chimeric AAV capsids of the disclosure, the first/recipient AAV capsid sequence and the second/donor AAV capsid sequence can be any known or herein described AAV capsid sequence including, for example, capsid sequences associated with the following AAV sequences: AAV-1, AAV-2, AAV-3, AAV-3B, AAV-4, AAV-5, AAV-6, AAV-7, AAV-8, AAV-9, AAV-10, AAV-11, AAV-12, AAV-13, AAVbo, AAVmo, AAV6.2, AAVRH.8, AAV4.10, AAVanc80L65 or AAVanc110, or any of the other AAV serotypes or capsid sequences herein described. Production of pseudotyped rAAV is disclosed in, for example, WO 01/83692. Other types of rAAV variants, for example rAAV with capsid mutations, are also contemplated. See, for example, Marsic et al., Molecular Therapy, 22(11): 1900-1909 (2014).

[0131] In certain embodiments, the chimeric AAV capsid proteins of the disclosure may comprise the amino acid sequence of any one of SEQ ID NOS:90-157 (see Table 7, below), each of which have at least one variable region from a donor AAV serotype swapped for the respective variable region(s) in the recipient backbone sequence.

[0132] In any of the chimeric AAV capsid proteins of the disclosure, the backbone sequence or the amino acid sequence from the first AAV capsid sequence derives from the amino acid sequence of any of SEQ ID NO:1-89, e.g., 1-73 or 15-89, or 158-164. In addition, in any of the chimeric AAV capsid proteins of the disclosure, the donor sequence or the amino acid sequence from the second AAV serotype derives from the amino acid sequence of one or more variable regions, GBS domain and/or GH loop of any of SEQ ID NO:1-89, e.g., 1-73 or 15-89, or 158-164.

[0133] In another embodiment, the disclosure provides for an isolated polynucleotide sequence comprising a nucleotide sequence encoding any of the engineered chimeric AAV capsid proteins of the disclosure. In addition, the disclosure provides for isolated AAV vectors comprising these polynucleotide sequences and AAV vectors comprising a polynucleotide sequence encoding any of the chimeric AAV capsid proteins of the disclosure. The disclosure also provides for compositions comprising these AAV vectors, including pharmaceutical compositions. The disclosure also provides for use of AAV virus comprising any of the herein described non-naturally occurring chimeric AAV capsid proteins.

[0134] Exemplary capsids include AAV1, AAV2, AAV4, AAV3, AAV5, AAV6, AAV7, AAV8, AAV9, AAV10, AAV11, AAV12, AAV13, AAV3b, LK03, rh74.j, rh10, bovine, AAVGoat, Bba.41, Bba.47, Bba.49, Bba.33, Bba.45, Bba.46, Bba.50, Bba.51, RN35, Anc110_9 VR, AAV_go.1, AAVs listed in Table 4, AAV listed in Table 5, AAV listed in Table 6, chimeric AAV listed in Table 7 and/or variants thereof.

### Capsid Pairs for Redosing

[0135] In various embodiments, it is contemplated that the subject receiving gene therapy is administered a gene therapy vector comprising a first AAV capsid, and if necessary, the subject may be administered a second dose of gene therapy comprising administration of a gene therapy vector comprising a second AAV capsid that is different from the first AAV capsid administered to the subject. The first and second AAV capsid can be referred to as “capsid pairs”

[0136] AAV has been divided into six different clades, A-F (Gao et al., J Virol 78:6381-6388, 2004) based on genome analysis and homology or diversity of different strains of AAV to other identified strains. AAV strains having higher homology are categorized in the same clade, and believed to derive from a similar lineage. According to Gao et al. (supra), most AAV strains belong to a different clade, though AAV1 and AAV6 appear to belong to the same clade as do AAV2 and AAV4.

[0137] It is contemplated that members of capsid pairs (or first and second capsids) are phylogenetically diverse and possess a limited amount of sequence homology. For example in various embodiments, the phylogenetic difference or diversity is based on a threshold level of sequence homology. In various embodiments, the capsid pairs are categorized in different clades. In another embodiment, the capsid pairs are derived from AAV that infect different hosts, e.g., human, baboon or other non-human primate, goats, ungulates and other animal which are infected by an AAV strain.

[0138] In various embodiments, the capsid pairs exhibit a sequence homology difference in one or more shared antibody binding epitopes. For example, the capsid pairs (or first and second capsids) have homology differences in two or more, three or more, four or more antibody epitopes found in the AAV capsid. In various embodiments, the sequence homology difference is at a threshold level that minimizes antibody cross-reactivity between the two capsids.

[0139] In various embodiments, a threshold level of sequence homology is approximately less than or equal to 90% sequence homology over the capsid amino acid sequence, or over any one of the VP1, VP2 or VP3 capsid proteins. In various embodiments, the first and second capsids (capsid pairs) have amino acid sequence homology that is less than or equal to about 90%. In various embodiments, the first and second capsids have less than or equal to about 90% homology in a VP1 capsid protein, have less than or equal to about 90% homology in a VP2 capsid protein and/or less than or equal to about 90% homology in a VP3 capsid protein. In various embodiments, the sequence homology of the capsids, or capsid proteins, may be less than or equal to 90%, 89%, 88%, 87%, 86%, 85%, 84%, 83%, 82%, 81%, 80%, 79%, 78%, 77%, 76%, 75% or lower. In various embodiments, the sequence homology of the capsids, or capsid proteins, may be from about 30% to 90% homologous, from about 45% to 87% homologous, from about 40% to 86% homologous, from about 50% to 85% homologous, or from about 60% to 80% homologous, or from about 65% to 75% homologous.

[0140] The decreased homology between the two capsid proteins limits the cross-reactive immune response to the second capsid that may be generated by the subject after receiving a second gene therapy dose.

[0141] For example, the percent identities of selected AAV vector capsids is set out in Table 2 and FIGS. 16 and 17. An exemplary phylogenetic tree based on sequence homology of VP3 regions is set out in FIG. 14.

TABLE 2
Capsid Protein Percent Homology

| | AAV5 | Bba.49 | Bovine | Bba.41 |
|---|---|---|---|---|
| AAV5 | | 55 | 56 | 59 |
| Bba.49 | 55 | | 77 | 65 |
| Bovine | 56 | 77 | | 60 |
| Bba.41 | 59 | 65 | 60 | |
| AAV9 | 59 | 63 | 59 | 79 |
| Rh74 | 58 | 64 | 60 | 81 |
| LK03 | 60 | 63 | 60 | 82 |
| AAV8 | 59 | 63 | 59 | 82 |
| Rh10 | 59 | 64 | 60 | 81 |

[0142] In a non-limiting example, capsid pairs are set out in Table 3, wherein the First Capsid can be paired with any one of the AAV listed as a Second Capsid. In a similar manner, any AAV listed as a second capsid could be administered as a first capsid, provided a different capsid is administered as the second capsid.

TABLE 3
Exemplary Capsid Pairs

| First Capsid | Second Capsid |
|---|---|
| AAV5 | Bba.49, bovine |
| LK03 | AAV5, Bba.49, bovine |
| AAV8 | AAV5, Bba.49, bovine |
| Rh10 | AAV5, Bba.49, bovine |

[0143] As described herein, the first and second capsids of a capsid pair for use in the redosing methods described herein are different from each other. With this in mind, in various embodiments, the first and second capsid is selected from the group consisting of AAV5, Bba.49, Bba.47 and bovine. In various embodiments, the first and second capsid proteins comprise an amino acid sequence that is at least 95% identical to (i) to SEQ ID NOS: 1, 5, 160 or 162, (ii) the VP2 region of any one of SEQ ID NOS: 1, 5, 160 or 162, or (iii) the VP3 region of any one of SEQ ID NOS: 1, 5, 160 or 162. In various embodiments, the first and second capsid proteins comprise an amino acid sequence of (i) any one of SEQ ID NOS:1, 5, 160 or 162, (ii) the VP2 region of any one of SEQ ID NOS: 1, 5, 160 or 162, or (iii) the VP3 region of any one of SEQ ID NOS: 1, 5, 160 or 162. In various embodiments, the first and second capsid proteins comprise an amino acid sequence of any one of SEQ ID NOS:1, 5, 160 or 162.

[0144] In various embodiments, the first and second capsid is selected from the group consisting of LK03, AAV5, Bba.49 and bovine. In various embodiments, the first and second capsid proteins comprise an amino acid sequence that is at least 95% identical to (i) to SEQ ID NOS: 1, 5, 162 or 173, (ii) the VP2 region of any one of SEQ ID NOS: 1, 5, 162 or 173, or (iii) the VP3 region of any one of SEQ ID NOS: 1, 5, 162 or 173. In various embodiments, the first and second capsid proteins comprise an amino acid sequence of (i) any one of SEQ ID NOS: 1, 5, 162 or 173, (ii) the VP2 region of any one of SEQ ID NOS: 1, 5, 162 or 173, or (iii) the VP3 region of any one of SEQ ID NOS: 1, 5, 162 or 173. In various embodiments, the first and second capsid proteins comprise an amino acid sequence of any one of SEQ ID NOS: 1, 5, 162 or 173.

[0145] In various embodiments, the first and second capsid is selected from the group consisting of AAV8, AAV5, Bba.49 and bovine. In various embodiments, the first and second capsid proteins comprise an amino acid sequence that is at least 95% identical to (i) to SEQ ID NOS: 1, 5, 9 or 162, (ii) the VP2 region of any one of SEQ ID NOS: 1, 5, 9 or 162, or (iii) the VP3 region of any one of SEQ ID NOS: 1, 5, 9 or 162. In various embodiments, the first and second capsid proteins comprise an amino acid sequence of (i) any one of SEQ ID NOS: 1, 5, 9 or 162, (ii) the VP2 region of any one of SEQ ID NOS: 1, 5, 9 or 162, or (iii) the VP3 region of any one of SEQ ID NOS: 1, 5, 9 or 162. In various embodiments, the first and second capsid proteins comprise an amino acid sequence of any one of SEQ ID NOS: 1, 5, 9 or 162.

[0146] In various embodiments, the first and second capsid is selected from the group consisting of rh10, AAV5, Bba.49 and bovine. In various embodiments, the first and second capsid proteins comprise an amino acid sequence that is at least 95% identical to (i) to SEQ ID NOS: 1, 5, 12 or 162, (ii) the VP2 region of any one of SEQ ID NOS: 1, 5, 12 or 162, or (iii) the VP3 region of any one of SEQ ID NOS: 1, 5, 12 or 162. In various embodiments, the first and second capsid proteins comprise an amino acid sequence of (i) any one of SEQ ID NOS: 1, 5, 12 or 162, (ii) the VP2 region of any one of SEQ ID NOS: 1, 5, 12 or 162, or (iii) the VP3 region of any one of SEQ ID NOS: 1, 5, 12 or 162. In various embodiments, the first and second capsid proteins comprise an amino acid sequence of any one of SEQ ID NOS: 1, 5, 12 or 162.

[0147] In certain embodiments, the first capsid protein and second capsid protein are from two different clades. In some embodiments, the first capsid protein and the second capsid protein are from the same clade but have sequence homology that is approximately less than or equal to 90% sequence homology over any one, two or thereof the VP1, VP2 or VP3 capsid proteins.

[0148] It is also contemplated herein that if a third or subsequent dose of gene therapy is required to re-express a transgene of interest in a subject, yet another distinct AAV capsid is used to redoes the therapy or readminister the transgene, and the third or subsequent vector is distinct from the first or second vector previously administered to the subject.

[0149] In various embodiments, neutralizing antibodies to the first capsid will not interfere with transduction of the 2^{nd} capsid. In various embodiments, administration of the second AAV capsid permits increased transduction efficiency in the subject compared to transduction levels after a second administration of a vector comprising the same first AAV capsid.

[0150] In various embodiments, the first capsid and second capsid exhibit low pre-existing immunity in the subject.

[0151] In various embodiments, the subject is human. In various embodiments, the subject is human and is immunologically naïve to the first and second AAV vector.

[0152] Colella et al., (Mol Ther Methods Clin Dev. 8: 87-104, 2018) discusses certain issues in AAV therapy, and describes that NAb titers as low as ˜1:5 can block transduction of the liver following AAV8-FIX vector administration in non-human primates. In various embodiments, the subject has neutralizing titers less than 1:2, 1:5, 1:10, 1:20, 1:50, 1:100, 1:200 or 1:300 to the first or second AAV vector in serum.

[0153] In certain embodiments, the subject with low pre-existing immunity has less than 1:2, 1:5, or 1:10 anti-first AAV vector neutralizing antibody titer or less than 1:100 total anti-first AAV vector-IgG titer in a sample (e.g., blood, sera, or plasma) from the subject as assessed by a technique described herein or known to one of skill in the art, such as, e.g., Meadows et al., Mol Ther Methods Clin Dev. 13: 453-462, 2019. In certain embodiments, the subject with low pre-existing immunity has less than 1:2, 1:5 or 1:10 anti-second AAV vector neutralizing antibody titer or less than 1:100 total anti-second AAV vector-IgG titer. In some embodiments, the subject with low pre-existing immunity has less than 1:10 anti-first AAV vector neutralizing antibody or less than 1:20, 1:50, 1:80, 1:100, 1:200, 1:300, 1:400, or 1:500 total anti-first AAV vector-IgG titer in a sample (e.g., blood, sera, or plasma) from the subject as assessed by a technique described herein or known to one of skill in the art, such as, e.g., Meadows et al., Mol Ther Methods Clin Dev. 13: 453-462, 2019. In certain embodiments, the subject with low pre-existing immunity has less than 1:10 anti-second AAV vector neutralizing antibody titer or less than 1:10, 1:20, 1:50, 1:80, 1:100, 1:200, 1:300, 1:400, or 1:500 total anti-second AAV vector-IgG titer (Meadows et al., Mol Ther Methods Clin Dev. 13: 453-462, 2029).

[0154] In some embodiments, the subject with low pre-existing immunity has an NC50 titer of anti-first AAV vector neutralizing antibody of less than 320, 312, 310, 300, 275, 250, 200, 175, 150, 125, 100, 75, 50, 30 or 25 in a sample (e.g., blood, sera, or plasma) from the subject as assessed by a technique described herein (e.g., in the Example section). In certain embodiments, the subject with low pre-existing immunity has an NC50 titer of anti-second AAV vector neutralizing antibody of less than 320, 312, 310, 300, 275, 250, 200, 175, 150, 125, 100, 75, 50, 30 or 25 in a sample (e.g., blood, sera, or plasma) from the subject as assessed by a technique described herein (e.g., in the Example section).

[0155] In various embodiments, the neutralizing antibody levels are measured in a neutralizing antibody assay. Methods to detect pre-existing AAV immunity include cell-based in vitro TI assays, in vivo (eg, mice) TI assays, and enzyme-linked immunosorbent assay (ELISA)-based detection of total anticapsid antibody (TAb) assays. (Masat et al., Discov Med 2013 15:379-389; Boutin et al., Hum Gene Ther 2010 21:704-712). The TAb assay may be able to detect low potency NAb that are below the threshold of TI assays, but it may not detect non-antibody neutralizing factors. In vivo and in vitro TI assays screen samples for anti-AAV Nab (Manno et al., Nat Med 2006, 12:342-347, Boutin et al., Hum Gene Ther 2010; 21: 704-712, Calcedo et al. Clin Vaccine Immunol 2011; 18: 1586-1588, Mingozzi et al., Gene Ther 2013; 20: 417-424, Calcedo et al., J Infect Dis 2009; 199: 381-390, Halbert et al., Hum Gene Ther 2006; 17: 440-447, Li et al., Gene Ther 2012; 19: 288-294, Moskalenko et al., J Virol 2000; 74: 1761-1766, Wang et al. Mol Ther 2010; 18: 126-134, Grimm et al., J Virol 2008; 82: 5887-5911, Greenberg et al. Gene Ther 2016; 23: 313-319, Meliani et al., Hum Gene Ther Methods 2015; 26: 45-53, Sun et al., J Immunol Methods 2013; 387: 114-120) and other factors that modulate AAV transduction efficiency (Berry et al. Mol Ther 2016; 24(Suppl 1): S14 (abstract 30), Weinberg et al. J Virol 2014; 88: 12472-12484, Hirosue et al. Virology 2007; 367: 10-18, Viral-Lowell et al., Gene Ther 2000; 7: 1783-1789, Mitchell et al. J Virol 2013; 87: 13035-13041, Mitchell et al., J Virol 2013; 87: 4571-4583, Berry et al. J Biol Chem 2016; 291: 939-947, Nonnenmacher et al. Gene Ther 2012; 19: 649-658).

[0156] In some embodiments, anti-first capsid protein antibody(ies) present in a sample (e.g., blood, sera or plasma) from a subject does not significantly cross-react with a second capsid protein if there is no detectable binding of the antibody(ies) to the second capsid protein as assessed by techniques known in the art, e.g., ELISA, Western blot, biolayer interferometry, FACS or BIACore. In certain embodiments, anti-first capsid antibody(ies) present in a sample (e.g., blood, sera or plasma) from a subject does not significantly cross-react with a second capsid if the antibody(ies) has a 5-fold, 10-fold, 15-fold, 20-fold, 25-fold or greater-fold affinity for the first capsid protein than the second capsid protein as assessed by techniques known in the art, e.g., ELISA, Western blot, biolayer interferometry, FACS or BIACore. In some embodiments, anti-second capsid protein antibody(ies) present in a sample (e.g., blood, sera or plasma) from a subject does not significantly cross-react with a first capsid protein if there is no detectable binding of the antibody(ies) to the first capsid protein as assessed by techniques known in the art, e.g., ELISA, Western blot, biolayer interferometry, FACS or BIACore. In certain embodiments, anti-second capsid antibody(ies) present in a sample (e.g., blood, sera or plasma) from a subject does not significantly cross-react with a first capsid if the antibody(ies) has a 5-fold, 10-fold, 15-fold, 20-fold, 25-fold or greater-fold affinity for the second capsid protein than the first capsid protein as assessed by techniques known in the art, e.g., ELISA, Western blot, biolayer interferometry, FACS or BIACore.

[0157] In some embodiments, anti-first AAV vector antibody(ies) present in a sample (e.g., blood, sera or plasma) from a subject does not significantly cross-react with a second AAV vector if there is no detectable binding of the antibody(ies) to the second AAV vector as assessed by techniques known in the art, e.g., ELISA, Western blot, biolayer interferometry, flow cytometry or BIACore, or described herein. In certain embodiments, anti-first AAV vector antibody(ies) present in a sample (e.g., blood, sera or plasma) from a subject does not significantly cross-react with a second AAV vector if the antibody(ies) has a 5 fold, 10 fold, 15 fold, 20 fold, 25 fold or greater fold affinity for the first AAV vector than the second AAV vector as assessed by techniques known in the art, e.g., ELISA, Western blot, biolayer interferometry, flow cytometry or BIACore. In some embodiments, anti-second AAV vector antibody(ies) present in a sample (e.g., blood, sera or plasma) from a subject does not significantly cross-react with a first AAV vector if there is no detectable binding of the antibody(ies) to the first AAV vector as assessed by techniques known in the art, e.g., ELISA, Western blot, biolayer interferometry, flow cytometry or BIACore, or described herein. In certain embodiments, anti-second AAV vector antibody(ies) present in a sample (e.g., blood, sera or plasma) from a subject does not significantly cross-react with a first AAV vector if the antibody(ies) has a 5 fold, 10 fold, 15 fold, 20 fold, 25 fold or greater fold affinity for the second AAV vector than the first AAV vector as assessed by techniques known in the art, e.g., ELISA, Western blot, biolayer interferometry, flow cytometry or BIACore. In a specific embodiment, cross-reactivity between a first capsid protein and a second capsid protein is determined as set forth in an Example provided herein.

[0158] In various embodiments, the redosing methods described herein may be utilized with one or more tissue-targeting capsid proteins. To determine the tissue specific infectivity of the AAV capsids disclosed herein, methods such as those described in WO2018/022608 or WO2019/222136, each of which is incorporated herein in its entirety and in particular for its tissue specific AAV infectivity assays and disclosure. Briefly, AAV comprising a test capsid and expressing one or more detectable transgenes, for example a luciferase transgene (e.g., a Fluc or Fluc2 gene) and/or a green fluorescent protein (GFP) transgene, may be generated and tested in animals, e.g., Balb/C mice, by introducing the AAV into the test animals at one or more concentrations and at an appropriate time post-infection (e.g., at 3 and 5 weeks post-infection) measurement, for example imaging, of the detectable marker or markers may be performed.

[0159] In the case of a luciferase marker, for example, in vivo bioluminescent imaging may be employed, utilizing standard bioluminescent substrates and imaging devices. Whole animal imaging and/or organ imaging may be used. Image data may be processed and analyzed using software, for example, living image software version 4.5.2 (PerkinsElmer Waltham, Mass.). Regions of interest may be traced surrounding each animal as well as individual organs to quantify the total flux (TF) (photons/second) being released by luciferase activity. Total flux activity is a proxy for AAV infectivity of each organ system.

[0160] With respect to muscle specificity, one method to classify a capsid as muscle-specific, is to calculate at the ratio of gastrocnemius flux/liver flux. If this ratio is greater than a specified ratio, e.g. a 2-fold increase in flux, and the flux in no other non-muscle tissue is greater than the flux in liver, the capsid protein may be characterized as muscle-specific. With respect to liver specificity, one method to classify a capsid as liver-specific is to associate a capsid with at least a 2-fold increase, for example at least a 5-10-fold increase, in liver flux relative to the other tissues tested.

[0161] Tissue specific infectivity imparted by a capsid may also be assessed, for example, by utilizing a GFP transgene, whereby tissue from infected infected test animals, e.g., mice, may be harvested and sectioned, and the percent of cells expressing GFP may be quantitated for different tissues or organs, for example, muscle or liver tissue or organs.

[0162] Utilizing assays such as described hereinabove, and as demonstrated in WO2018/022608 and/or WO2019/222136, AAV capsid proteins Bba.45, Bba.46, Bba.47, Bba.49, Bba.50 and Bba.51 have been identified as liver-tropic, that is, ingas exhibit a high degree of liver-specificity, while AAV capsid proteins AAVancl 10_9 VR, Bba.26, Bba41, Bba.42, Bba.43 and Bba.44 have been identified as muscle-tropic, that is, as exhibiting a high degree of muscle-specificity.

Production of AAV with the Capsid Proteins

[0163] The disclosure encompasses AAV capsid protein sequences and the nucleic acids encoding these proteins of which are free of DNA and/or cellular material which these viruses are associated in nature. In another aspect, the present disclosure provides molecules which utilize the novel AAV sequences of the disclosure, including fragments thereof, for production of molecules useful in delivery of a heterologous gene or other nucleic acid sequences to a target cell.

[0164] In another aspect, the present disclosure provides molecules which utilize the AAV capsid protein sequences of the disclosure, including fragments thereof, for production of viral vectors useful in delivery of a heterologous gene or other nucleic acid sequences to a target cell.

[0165] The methods used to construct any embodiment of this disclosure are known to those with skill in nucleic acid manipulation and include genetic engineering, recombinant engineering, and synthetic techniques. See, e.g., Sambrook et al, Molecular Cloning: A Laboratory Manual, Cold Spring Harbor Press, Cold Spring Harbor, N.Y.

[0166] In one embodiment, the vectors of the disclosure contain, at a minimum, sequences encoding the AAV capsid of the disclosure or a fragment thereof. In another embodiment, the vectors of the disclosure contain, at a minimum, sequences encoding an AAV rep protein or a fragment thereof. Optionally, such vectors may contain both AAV cap and rep proteins. In vectors in which both AAV rep and cap are provided, the AAV rep and AAV cap sequences can both be of the same AAV serotype origin. Alternatively, the present disclosure provides vectors in which the rep sequences are from an AAV serotype which differs from that which is providing the cap sequences. In one embodiment, the rep and cap sequences are expressed from separate sources (e.g., separate vectors, or a host cell and a vector). In another embodiment, these rep sequences are fused in frame to cap sequences of a different AAV serotype to form a chimeric AAV vector. Optionally, the vectors further contain a minigene comprising a selected transgene which is flanked by AAV 5′ ITR and AAV 3′ ITR.

[0167] Thus, in one embodiment, the vectors described herein contain nucleic acid sequences encoding an intact AAV capsid protein of any one of amino acid sequences SEQ ID 1-89, e.g., 1-73 or 15-89, or 158-164. Alternatively, these vectors contain sequences encoding artificial capsids which contain one or more fragments of the capsid in SEQ ID NOs: 1-89, e.g., 1-73 or 15-89, or 158-164 fused to heterologous AAV or non-AAV capsid proteins (or fragments thereof). These artificial capsid proteins are selected from non-contiguous portions of the any of the AAV capsid proteins of the invention or from capsids of other AAV serotypes.

[0168] In another example, it may be desirable to alter the start codon of the VP3 protein to GTG. Alternatively, the rAAV may contain one or more of the variable regions of one or more of the AAV capsid proteins of the disclosure, or other fragments. These modifications may be to increase expression, yield, and/or to improve purification in the selected expression systems, or for another desired purpose (e.g., to change tropism or alter neutralizing antibody epitopes).

[0169] The vectors described herein, e.g., a plasmid, are useful for a variety of purposes, but are particularly well suited for use in production of a rAAV containing a capsid comprising AAV sequences or a fragment thereof. These vectors, including rAAV, their elements, construction, and uses are described in detail herein.

Capsid Proteins from Baboon Liver

[0170] AAV VP1 capsid proteins isolated from baboon liver are disclosed in co-owned PCT Application No. PCT/US19/32097, which published as WO2019/222136, and which is incorporated herein by reference in its entirety.

[0171] The VP1 sequence of an AAV capsid isolated from baboon (denoted as Bba.45) is set out as SEQ ID NO:158 (amino acids 1-742) and the locations of the associated variable regions and GBS and GH loop regions are defined in Table 4 below. The VP2 capsid protein spans amino acids 138-742 of SEQ ID NO:158 and the VP3 capsid protein spans amino acids 206-742 of SEQ ID NO:158.

(SEQ ID NO: 158)
MAADGYLPDWLEDNLSEGIREWWALKPGAPQPKANRQHQDNARGLVLPGY
KYLGPGNGLDKGEPVNEADAAALEHDKAYDQQLKSGDNPYLKYNHADAEF
QQRLATDTSFGGNLGKAVFQAKKRILEPLGLVEEGVKTAPGKKRPLEKTP
NRPTNPDSGKAPAKKKQKDGETADSARRALDFEDSGAGDGPPEGSSSGEM
SHDAEMRAAPGGNAVEAGQGADGVGNASGDWHCDSTWSEGRVTTTSTRTW
VLPTYNNHLYLRIGTTANSNTYNGFSTPWGYFDFNRFHCHFSPRDWQRLI
NNNWGLRPKSMRVKIFNIQVREVTTSNGETTVANNLTSTVQIFADSTYEL
PYVMDAGQEGSLPPFPNDVFMVPQYGYCGVVTGENQNQTDRNAFYCLEYF
PSQMLRTGNNFEISYQFEKVPFHSMYAHSQSLDRMMNPLLDQYLWHLQST
TTGNSLNQGTATTTYGKITTGDFAYYRKNWLPGACIKQQKFSKNASQNYK
IPASGGDALLKYDTHTTLNGRWSNMAPGPPMATAGAGDSDFSNSQLIFAG
PNQSGNTTTSSNNLLFTSEEEIATTNPRDTDMFGQIADNNQNATTAPHIA
NLDAMGIVPGMVWQNRDIYYQGPIWAKVPHTDGHFHPSPLMGGFGLKHPP
PQIFIKNTPVPANPNTTFSAARINSFLTQYSTGQVAVQIDWEIQKEHSKR
WNPEVQFTSNYGTQNSMLWAPDNAGNYHEPRAIGSRFLTHHL

[0172] The VP1 sequence of an AAV capsid isolated from baboon (denoted as Bba.46) is set out as SEQ ID NO: 159 (amino acids 1-742) and the locations of the associated variable regions and GBS and GH loop regions are defined in Table 4 below. The VP2 capsid protein spans amino acids 138-742 of SEQ ID NO: 159 and the VP3 capsid protein spans amino acids 206-742 of SEQ ID NO: 159.

(SEQ ID NO: 159)
MAADGYLPDWLEDNLSEGIREWWALKPGAPQPKANQQHQDNARGLVLPGY
KYLGPGNGLDKGEPVNEADAAALEHDKAYDQQLKSGDNPYLKYNHADAEF
QQRLATDTSFGGNLGKAVFQAKKRILEPLGLVEEGVKTAPGKKRPLEKTP
NRPTNPDSGKAPAKKKQKDGETADSARRTLDFEDSGAGDGPPEGSSSGEM
SHDAEMRAAPGGNAVEAGQGADGVGNASGDWHCDSTWSEGRVTTTSTRTW
VLPTYNNHLYLRIGTTANSNTYNGESTPWGCFDENREHCHFSPRDWQRLI
NNNWGLRPKSMRVKIFNIQVKEVTTSNGETTVANNLTSTVQIFADSTYEL
PYVMDAGQEGSLPPFPNDVFMVPQYGYCGVVTGENQNQTDRNAFYCLEYF
PSQMLRTGNNFEISYQFEKVPFHSMYAHSQSLDRMMNPLLDQYLWHLQST
TTGNSLNQGAATTTYGKITTGDFAYYRKNWLPGACIKQQKFSKNASQNYK
IPASGGDALLKYDTHTTLNGRWSNMAPGPPMATAGAGDSDFSNSQLIFAG
PNQSGNTTTSSNNLLFTSEEEIATTNPRDTDMFGQIADNNQNATTAPHIA
NLDAMGIVPGMVWQNRDIYYQGPIWAKVPHTDGHFHPSPLMGGFGLKHPP
PQIFIKNTPVPANPNTTFSAARINSFLTQYSTGQVAVQIDWEIQKEHSKR
WNPEVQFTSNYGTQNSMLWAPDNAGNYHEPRAIGSRFLTHHL

[0173] The VP1 sequence of an AAV capsid isolated from baboon (denoted as Bba.47) is set out as SEQ ID NO: 160 (amino acids 1-742) and the locations of the associated variable regions and GBS and GH loop regions are defined in Table 4 below. The VP2 capsid protein spans amino acids 138-742 of SEQ ID NO: 160 and the VP3 capsid protein spans amino acids 206-742 of SEQ ID NO: 160.

(SEQ ID NO: 160)
MAADGYLPDWLEDNLSEGIREWWALKPGAPQPKANQQHQDNARGLVLPGY
KYLGPGNGLDKGEPVNEADAAALEHDKAYDQQLKSGDNPYLKYNHADAEF
QQRLATDTSFGGNLGKAVFQAKKRILEPLGLVEEGVKTAPGKKRPLEKTP
NRPTNPDSGKAPAKKKQKDGETADSARRTLDFEDSGAGDGPPEGSSSGEM
SHDAEMRAAPGGNAVEAGQGADGVGNASGDWHCDSTWSEGRVTTTSTRTW
VLPTYNNHLYLRIGTTANSNTYNGFSTPWGYFDFNRFHCHFSPRDWQRLI
NNNWGLRPKSMRVKIFNIQVKEVTTSNGETTVANNLTSTVQIFADSTYEL
PYVMDAGQEGSLPPFPNDVFMVPQYGYCGVVTGENQNQTDRNAFYCLEYF
PSQMLRTGNNFEISYQFEKVPFHSMYAHSQSLDRMMNPLLDQYLWHLQST
TTGNSLNQGTATTTYGKITTGDFAYYRKNWLPGACIKQQKFSKNASQNYK
IPASGGDALLKYDTHTTLNGRWSNMAPGPPMATAGAGDSDFSNSQLIFAG
PNQSGNTTTSSNNLLFTSEEEIATTNPRDTDMFGQIADNNQNATTAPHIA
NLDAMGIVPGMVWQNRDIYYQGPIWAKVPHTDGHFHPSPLMGGFGLKHPP
PQIFIKNTPVPANPNTTFSAARINSFLTQYSTGQVAVQIDWEIQKEHSKR
WNPEVQFTSNYGTQNSMLWAPDNAGNYHEPRAIGSRFLTHHL

[0174] The VP1 sequence of an AAV capsid isolated from baboon (denoted as Bba.48) is set out as SEQ ID NO: 161 (amino acids 1-742) and the locations of the associated variable regions and GBS and GH loop regions are defined in Table 4 below. The VP2 capsid protein spans amino acids 138-742 of SEQ ID NO: 161 and the VP3 capsid protein spans amino acids 206-742 of SEQ ID NO: 161.

(SEQ ID NO: 161)
MAADGYLPDWLEDNLSEGIREWWALKPGAPQPKANQQHQDNARGLVLPGY
KYLGPGNGLDKGEPVNEADAAALEHDKAYDQQLKSGDNPYLKYNHADAEF
QERLQEDTSFGGNLGRAVFQAKKRILEPLGLVEEGVKTAPGKKRPLEKTP
NRPTNPDSGKAPAKKKQKDGETADSARRTLDFEDSGAGDGPPEGSSSGEM
SHDAEMRAAPGGNAVEAGQGADGVGNASGDWHCDSTWSEGRVTTTSTRTW
VLPTYNNHLYLRIGTTANSNTYNGFSTPWGYFDFNRFHCRFSPRDWQRLI
NNNWGLRPKSMRVKIFNIQVKEVTTSNGETTVANNLTSTVQIFADSTYEL
PYVMDAGQEGSLPPFPNDVFMVPQYGYCGVVTGENQNQTDRNAFYCLEYF
PSQMLRTGNNFEISYQFEKVPFHSMYAHSQSLDRMMNPLLDQYLWHLQST
TTGNSLNQGTAITTYGKITTGDFAYYRKNWLPGACIKQQKFSKNASQNYK
IPASGGDALLKYDTHTTLNGRWSNMAPGPPMATAGAGDSDFSNSQLIFAG
PNQSGNTTTSSNNLLFTSEEEIATTNPRDTDMFGQIADNNQNAATAPHIA
NLDAMGIVPGMVWQNRDIYYQGPIWAKVPHTDGHFHPSPLMGGFGLKHPP
PQIFIKNTPVPANPNTTFSAARINSFLTQYSTGQVAVQIDWEIQKEHSKR
WNPEVQFTSNYGTQNSMLWAPDNAGNYHEPRAIGSRFLTHHL

[0175] The VP1 sequence of an AAV capsid isolated from baboon (denoted as Bba.49) is set out as SEQ ID NO: 162 (amino acids 1-742) and the locations of the associated variable regions and GBS and GH loop regions are defined in Table 4 below. The VP2 capsid protein spans amino acids 138-742 of SEQ ID NO: 162 and the VP3 capsid protein spans amino acids 206-742 of SEQ ID NO: 162.

(SEQ ID NO: 162)
MAADGYLPDWLEDNLSEGIREWWALKPGAPQPKANQQHQDNARGLVLPGY
KYLGPGNGLDKGEPVNEADAAALEHDKAYDQQLKSGDNPYLKYNHADAEF
QERLQEDTSFGGNLGRAVFQAKKRILEPLGLVEEGVKTAPGKKRPLEKTP
NRPTNPDSGKAPAKKKQKDGETADSARRTLDFEDSGAGDGPPEGSSSGEM
SHDAEMRAAPGGNAVEAGQGADGVGNASGDWHCDSTWSEGRVTTTSTRTW
VLPTYNNHLYLRIGTTANSNTYNGFSTPWGYFDFNRFHCHFSPRDWQRLI
NNNWGLRPKSMRVKIFNIQVKEVTTSNGETTVANNLTSTVQIFADSTYEL
PYVMDAGQEGSLPPFPNDVFMVPQYGYCGVVTGENQNQTDRNAFYCLEYF
PSQMLRTGNNFEISYQFEKVPFHSMYAHSQSLDRMMNPLLDQYLWHLQST
TTGNSLNQGTAITTYGKITTGDFAYYRKNWLPGAGIKQQKFSKNASQNYK
IPASGGDALLKYDTHTTLNGRWSNMAPGPPMATAGAGDSDFSNSQLIFAG
PNQSGNTTTSSNNLLFTSEEEIATTNPRDTDMFGQIADNNQNATTAPHIA
NLDAMGIVPGMVWQNRDIYYQGPIWAKVPHTDGHFHPSPLMGGFGLKHPP
PQIFIKNTPVPANPNTTFSAARINSFLTQYSTGQVAVQIDWEIQKEHSKR
WNPEVQFTSNYGTQNSMLWAPDNAGNYHEPRAIGSRFLTHHL

[0176] The VP1 sequence of an AAV capsid isolated from baboon (denoted as Bba.50) is set out as SEQ ID NO: 163 (amino acids 1-742) and the locations of the associated variable regions and GBS and GH loop regions are defined in Table 4 below. The VP2 capsid protein spans amino acids 138-742 of SEQ ID NO: 163 and the VP3 capsid protein spans amino acids 206-742 of SEQ ID NO: 163.

(SEQ ID NO: 163)
MAADGYLPDWLEDNLSESIREWWALKPGAPRPKANQQHQDDARGLVLPGY
KYLGPGNGLDKGEPVNEADAAALEHDKAYDQQLKSGDNPYLKYNHADAEF
QQRLATDTSFGGNLGKAVFQAKKRILEPLGLVEEGVKTAPGRKRPLEKTP
NRPTNPDSGKAPAKKKQKDGETADSARRTLDFEDSGAGDGPPEGSSSGEM
SHDAEMRAAPGGNAVEAGQGADGVGNASGDWHCDSTWSEGRVTTTSTRTW
VLPTYNNHLYLRIGTTANSNTYNGFSTPWGYFDFNRFHCHFSPRDWQRLI
NNNWGLRPKSMRVKIFNIQVKEVTTSNGETTVANNLTSTVQIFADSTYEL
PYVMDAGQEGSLPPFPNDVFMVPQYGYCGVVTGENQNQTDRNAFYCLEYF
PSQMLRTGNNFEISYQFEKVPLHSMYAHSQSLDRMMNPLLDQYLWHLQST
TTGNSLNQGTATTTYGKITTGDFAYYRKNWLPGACIKQQKFSKNASQNYK
IPASGEDALLKYDTHTTLNGRWSNMAPGPPMATAGAGDSDFSNSQLIFAG
PNQSGNTTTSSNNLLFTSEEEIATTNPRDTDMFGQIADNNQNATTAPHIA
NLDAMGIVPGMVWQNRDIYYQGPIWAKVPHTDGHFHPSPLMGGFGLKHPP
PQIFIKNTPVPANPNTTFSAARINSFLTQYSTGQVAVQIDWEIQKEHSKR
WNPEVQFTSNYGTQNSMLWAPDNAGNYHEPRAIGSRFLTHHL

[0177] The VP1 sequence of an AAV capsid isolated from baboon (denoted as Bba.51) is set out as SEQ ID NO: 164 (amino acids 1-742) and the locations of the associated variable regions and GBS and GH loop regions are defined in Table 4 below. The VP2 capsid protein spans amino acids 138-742 of SEQ ID NO: 164 and the VP3 capsid protein spans amino acids 206-742 of SEQ ID NO: 164.

(SEQ ID NO: 164)
MAADGYLPDWLEDNLSEGIREWWALKPGAPQPKANQQHQDNARGLVLPGY
KYLGPGNGLDKGEPVNEADAAALEHDKAYDQQLKSGDNPYLKYNHADAEF
QQRLATDTSFGGNLGKAVFQAKKRILEPLGLVEEGVKTAPGKKRPLEKTP
NRPTNPDSGKAPAKKKQKDGETADSARRTLDFEDSGAGDGPPEGSSSGEM
SHDAEMRAAPGGNAVEAGQGADGVGNASGDWHCDSTWSEGRVTTTSTRTW
VLPTYNNHLYLRIGTTANSNTYNGFSTPWGYFDFNRFHCHFSPRDWQRLI
NNNWGLRPKSMRVKIFNIQVKEVTTSNGETTVANNLTSTVQIFADSTYEL
PYVMDAGQEGSLPPFPNDVFMVPQYGYCGVVTGENQNQTDRNAFYCLEYF
PSQMLRTGNNFEISYQFEKVPFHSMYAHSQSLDRMMNPLLDQYLWHLQST
TTGNSLNQGTATTTYGKITTGDFAYYRKNWLPGACIKQQKFSKNASQNYK
IPASGGDALLKYDTHTTLNGRWSNMAPGPPMATAGAGDSDFSNSQLIFAG
PNQSGNTTTSSNNLLFTSEEEIATTNPRDTDMFGQIADNNQNATTAPHIA
NLDAMGIVPGMVWQNRDIYYQGPIWAKVPHTDGHFHPSPLMGGFGLKHPP
PQIFIKNTPVPANPNTTFSAARINSFLTQYSTGQVAVQIDWEIQKEHSKR
WNPEVQFTSNYGTQNSMLWAPDNAGNYHEPRAIGSRFLTHHL

[0178] The corresponding nucleic acid sequences encoding the above referenced capsid proteins are set out as follows: SEQ ID NO:165/Bba.45; SEQ ID NO:166/Bba.46; SEQ ID NO:167/Bba.47; SEQ ID NO:168/Bba.48; SEQ ID NO:169/Bba.49; SEQ ID NO:170/Bba.50; and SEQ ID NO:171/Bba.51.

[0179] In Table 4 below, “VR” refers to the variable region and the numbers refer to the amino acid residues of each variable region or the GBS and GH loop regions in the amino acid sequence.

TABLE 4

| AAV | VRI | VRII | VRIII | VRIV | GBS | VRV | VRVI | VRVII | VRVIII | VRIX | GHloop |
|---|---|---|---|---|---|---|---|---|---|---|---|
| AAVBba.45 | 265- | 325- | 380- | 452- | 467- | 490- | 534- | 550- | 587- | 710- | 448- |
| | 268 | 330 | 386 | 462 | 478 | 512 | 544 | 564 | 599 | 718 | 607 |
| AAVBba.46 | 265- | 325- | 380- | 452- | 467- | 490- | 534- | 550- | 587- | 710- | 448- |
| | 268 | 330 | 386 | 462 | 478 | 512 | 544 | 564 | 599 | 718 | 607 |
| AAVBba.47 | 265- | 325- | 380- | 452- | 467- | 490- | 534- | 550- | 587- | 710- | 448- |
| | 268 | 330 | 386 | 462 | 478 | 512 | 544 | 564 | 599 | 718 | 607 |
| AAVBba.48 | 265- | 325- | 380- | 452- | 467- | 490- | 534- | 550- | 587- | 710- | 448- |
| | 268 | 330 | 386 | 462 | 478 | 512 | 544 | 564 | 599 | 718 | 607 |
| AAVBba.49 | 265- | 325- | 380- | 452- | 467- | 490- | 534- | 550- | 587- | 710- | 448- |
| | 268 | 330 | 386 | 462 | 478 | 512 | 544 | 564 | 599 | 718 | 607 |
| AAVBba.50 | 265- | 325- | 380- | 452- | 467- | 490- | 534- | 550- | 587- | 710- | 448- |
| | 268 | 330 | 386 | 462 | 478 | 512 | 544 | 564 | 599 | 718 | 607 |
| AAVBba.51 | 265- | 325- | 380- | 452- | 467- | 490- | 534- | 550- | 587- | 710- | 448- |
| | 268 | 330 | 386 | 462 | 478 | 512 | 544 | 564 | 599 | 718 | 607 |

Capsid Proteins from AAV

[0180] Capsid proteins isolated from tissue from the following mammals: baboon, crab-eating macaque, cynomolgus macaque, marmoset and pig useful in the methods of described herein are also described in co-owned International Patent Publication No. WO 2018/022608, incorporated herein by reference.

[0181] Contemplated for use in the methods are engineered chimeric AAV capsid proteins (and AAV comprising those capsid proteins) in which one or more variable region(s), the GBS region and/or the GH loop in a backbone (or recipient) capsid protein sequence are substituted with one or more variable region(s), GBS region and/or GH loop from a different AAV capsid sequence donor. The recipient and donor sequences may derive from any previously known AAV serotype or capsid sequence, or any novel AAV capsid sequence described herein. The engineered AAV capsid proteins are generated by swapping at least one variable region, GBS region or GH loop region from one capsid sequence for the respective region(s) in a recipient capsid sequence. In this regard, it is noted that one, two, three, four, five, six, seven, eight or all nine VRs in a recipient VP1 capsid sequence can be replaced by the respective region(s) from one or more different VP1 capsid sequence. Any and all of the various combinations of engineered, chimeric AAV capsid sequences that can be produced by the VR region swapping method described herein (and all associated AAV virus comprising those chimeric capsid sequences) are contemplated herein.

[0182] The VP1 sequence of an AAV capsid isolated from baboon (denoted as Bba.21) is set out as SEQ ID NO:15 (amino acids 1-742) and the locations of the associated variable regions and GBS and GH loop regions are defined in Table 5 below. The VP2 capsid protein spans amino acids 138-742 of SEQ ID NO:15 and the VP3 capsid protein spans amino acids 206-742 of SEQ ID NO:15.

(SEQ ID NO: 15)
MAADGYLPDWLEDNLSEGIREWWALKPGAPQPKANQQHQDNARGLVLPGY
KYLGPGNGLDKGEPVNEADAAALEHDKAYDQQLKSGDNPYLKYNHADAEF
QQRLATDTSFGGNLGKAVFQAKKRILEPLGLVEEGVKTAPGKKRPLEKTP
NRPTNPDSGKAPAKKKQKDGETADSARRTLDFEDSGAGDGPPEGSSSGEM
SHDAEMRAAPGGNAVEAGQGADGVGNASGDWHCDSTWSEGRVTTTSTRTW
VLPTYNNHLYLRIGTTANSNTYNGESTPWGYFDENREHCHFSPRDWQRLI
NNNWGLRPKSMRVKIFNIQVKEVTTSNGETTVANNLTSTVQIFADSTYEL
PYVMDAGQEGSLPPFPNDVFMVPQYGYCGVVTGENQNQTDRNAFYCLEYF
PSQMLRTGNNFEVSYQFEKVPFHSMYAHSQSLDRMMNPLLDQYLWHPQST
TTGNSLNQGTATTTYGKITTGDFAYYRKNWLPGACIKQQKFSKNASQNYK
IPASGGDALLKYDTHTTSNGRWSNMAPGPPMATAGAGDSDFSNSQLIFAG
PNQSGNTTTSSNNLLFTSEEEIATTNPRDTDMFGQIADNNQNATTAPHIA
NLDAMGIVPGMVWQNRDIYYLGPIWAKVPHTDGHFHPSPLMGGFGLKHPP
PQIFIKNTPVPANPNTTFSAARINSFLTQYSTGQVAVQIDWEIQKEHSKR
WDPEVQFTSNYGTQNSMLWAPDNAGNYHEPRAIGSRFLTHHL

[0183] The VP1 sequence of an AAV capsid isolated from baboon (denoted as Bba.26) is set out as SEQ ID NO:16 (amino acids 1-739) and the locations of the associated variable regions and GBS and GH loop regions are defined in Table 5 below. The VP2 capsid protein spans amino acids 138-739 of SEQ ID NO:16 and the VP3 capsid protein spans amino acids 206-739 of SEQ ID NO:16.

(SEQ ID NO: 16)
MAADGYLPDWLEDNLSEGIREWWALKPGAPQPKANQQHQGNSRGLVLPGY
KYLGLFNGLDKGEPVNEADAAALEHDKAYDKQLEQGDDPYLKYNHADAEF
QERLQEDTSFGGNLGRAVFQAKKRILEPLGLVEEAAKTAPGKKRPLEKTP
NQPTDTQAAGQTPAKKRPQGEQSGDSARRQLDFGPQPAAPIGQPPAAPPP
VGSNTMASGGGGPMADDNQGADGVGNASGNWHCDSTWLGDRVITTSTRTW
VLPTYNNHIYKQISSESGATNDNHYFGYSTPWGYFDFNRFHCHFSPRDWQ
RLINNNWGFRPKRLNFKIFNVQVKEVTQIEGGSTIANNLTSTIQVFADSE
YQLPYVLGSAHQGCLPPFPADVFMIPQYGYLTLNNGSQSVGRSSFYCLEY
FPSQMLRTGNNFQFSYTFESVPFHSSYAHSQSLDRIMNPLVDQYLYYLAR
TQTGTGSTTSNTRQLQFYQAGPSNMADQSRNWLPGPMYRQQRVSKTLDQN
SNTNFAWTAASKYNLNGRKSLANPGIAMATHKDDEERFFPQHGVLVFGQT
NATNKTTLDNVLVTSEEEIKATNPVATEEYGTVSSNLQASNTNPTTETVN
NQGILPGMVWQDRDVYLQGPIWAKIPHTDGHFHPSPLMGGFGLKHPPPQI
LIKNTPVPANPPETFTTSKFASYITQYSTGQVSVEIEWELQKENSKRWNP
EIQYTSNYAKSNNVEFSVDAAGVYSEPRPIGTRYLTRNL

[0184] The VP1 sequence of an AAV capsid isolated from baboon (denoted as Bba.27) is set out as SEQ ID NO:17 (amino acids 1-739) and the locations of the associated variable regions and GBS and GH loop regions are defined in Table 5 below. The VP2 capsid protein spans amino acids 138-739 of SEQ ID NO:17 and the VP3 capsid protein spans amino acids 206-739 of SEQ ID NO:17.

(SEQ ID NO: 17)
VAADGYLPDWLEDNLSEGIREWWALKPGAPQPKANQQHQDNSRGLVLPGY
KYLGPFNGLDKGEPVNEADAAALEHDKAYDKQLEQGDNPYLKYNHADAEL
QERLQEDTSFGGNLGRAVFQAKKRILEPLGLVEEAAKTAPGKKRPLEKTP
NQPTDTQAAGQTPAKKRPQGEQSGDSARRQLDFDPQPAAPIGQPPAAPPP
VGSNTMASGGGGPMADDNQGADGVGNASGNWHRDSTWLGDRVITTSTRTW
VLPTYNNHIYKQISSESGATNDNHYEGYSTPWGYFDFNRFHCHFSPRDWQ
RLINNNWGFRPKRLNFKIFNIQVKEVTQIEGGSTIANNLTSTIQVFADSE
YQLPYVLGSAHQGCLPPFPADVFMIPQYGYLTLNNGSQSVGRSSFYCLEY
FPSQMLRTGNNFQFSYTFESVPFHSSYAHSQSLDRIMNPLVDQYLYYLAR
TQTGTGSTTSNTRQLQFYQAGPSNMADQSRNWLPGPMYRQQRVSKTLDQN
SNTNFAWTAASKYNLNGRKSLANPGIAMATHKDDEERFFPQHGVLVFGQT
NATNKTTLDNVLITSEEEIKATNPVATEEYGTVSSNLQASNTNPTTETVN
SQGILPGMVWQDRDVYLQGPIWAKIPHTDGHFHPSPLMGGFGLKHPPPQI
LIKNTPVPANPPETFTTSKFASYITQYSTGQVSVEIEWELQKENGKRWNP
EIQYTSNYAKSNNVEFSVDAAGVYSEPRPIGTRYLTRNL

[0185] The VP1 sequence of an AAV capsid isolated from baboon (denoted as Bba.29) is set out as SEQ ID NO:18 (amino acids 1-739) and the locations of the associated variable regions and GBS and GH loop regions are defined in Table 5 below. The VP2 capsid protein spans amino acids 138-739 of SEQ ID NO:18 and the VP3 capsid protein spans amino acids 206-739 of SEQ ID NO:18.

(SEQ ID NO: 18)
MAADGYLPDWLEDNLSEGIREWWALKPGAPQPKANQQHQDNSRGLVLPGY
KYLGPFNGLDKGEPVNEADAAALEHDKAYDKQLEQGDNPYLKYNHADAEF
QERLQEDTSFGGNLGRAVFQAKKRILEPLGLVEEAAKTAPGKRRPLEKTP
NQPTDTQAAGQTPAKKRPQGEQSGDSARRQLDFDPQPAAPIGQPPAAPSP
VGSNTMASGGGGPMADDNQGADGVGNASGNWHCDSTWLGDRVITTSTRTW
VLPTYNNHIYKQISSESGATNDNHYEGYSTPWGYFDFNRFHCHFSPRDWQ
RLINNNWGFRPKRLNFKIFNIQVKEVTQIEGGSTIANNLTSTIQVFADSE
YQLPYVLGSAHQGCLPPFPADVFMIPQYGYLTLNNGSQSVGRSSFYCLEY
FPSQMLRTGNNFQFSYTFESVPFHSSYAHSQSLDRIMNPLVDQCLYYLAR
TQTGTGSTTSNTRQLQFYQAGPSNMADQSRNWLPGPMYRQQRVSKTLDQN
SNTNFAWTAASKYNLNGRKSLANPGIAMATHKDDEERFFPQHGVLVFGQT
NATNKTTLDNVLITSEEEIKATNPVATEEYGTVSSNLQASNTNPTTETVN
NQGILPGMVWQDRDVYLQGPIWAKIPHTDGHFHPSPLMGGFGLKHPPPQI
LIKNTPVPANPPETFTTSKFASYITQYSTGQVSVEIEWELQKEDSKRWNP
EIQYTSNYAKSNNVEFSVDAAGVYSEPRPIGTRYLTRNL

[0186] The VP1 sequence of an AAV capsid isolated from baboon (denoted as Bba.30) is set out as SEQ ID NO:19 (amino acids 1-739) and the locations of the associated variable regions and GBS and GH loop regions are defined in Table 5 below. The VP2 capsid protein spans amino acids 138-739 of SEQ ID NO:19 and the VP3 capsid protein spans amino acids 206-739 of SEQ ID NO:19.

(SEQ ID NO: 19)
MAADGYLPDWLEDNLSEGIREWWALKPGAPQPKANQQHQDNSRGLVLPGY
KYLGPFNGLDKGEPVNEADAAALEHDKAYDKQLEQGDNPYLKYNHADAEF
QERLQEDTSFGGNLGRAVFQAKKRILEPLGLVEEAAKTAPGKKRPLEKTP
NQPTDTQAAGQTPAKKRPQGGQSGDSARRQLDFDPQPAAPIGQPPAAPSP
VGSNTMASGGGGPMADDNQGADGVGNASGNWHCDSTWLGDRVITTSTRTW
VLPTYNNHIYKQISSESGATNDNHYFGYSTPWGYFDFNRFHCHFSPRDWQ
RLINNNWGFRPKRLNFKIFNIQVKEVTQIEGGSTIANNLTSTIQVFADSE
YLLPYVLGSAHQGCLPPFPADVFMIPQYGYLTLNNGSQSVGRSSFYCLEY
FPSQMLRTGNNFQFSYTFESVPFHSSYAHSQSLDRIMNPLVDQYLYYLAR
TQTGTGSTTSNTRQLQFYQAGPSNMADQSRNWLPGPMYRQQRVSKTLDQN
SNTNFAWTAASKYNLNGRKSLANPGIAMATHKDDEERFFPQHGVLVFGQT
NATNKTTLDNVLITSEEEIKATNPVATEEYGTVSSNLQASNTNPTTETVN
NQGILPGMVWQDRDVYLQGPIWAKIPHTDGHFHPSPLMGGFGLKHPPPQI
LIKNTPVPANPPETFTTSKFASYITQYSTGQVSVEIEWELQKEDSKRWNP
EIQYTSNYAKSNNVEFSVDAAGVYSEPRPIGTRYLTRNL

[0187] The VP1 sequence of an AAV capsid isolated from baboon (denoted as Bba.31) is set out as SEQ ID NO:20 (amino acids 1-742) and the locations of the associated variable regions and GBS and GH loop regions are defined in Table 5 below. The VP2 capsid protein spans amino acids 138-742 of SEQ ID NO:20 and the VP3 capsid protein spans amino acids 206-742 of SEQ ID NO:20.

(SEQ ID NO: 20)
MAADGYLPDWLEDNLSEGIREWWALKPGAPQPKANQQHQDNARGLVLPGY
KYLGPGNGLDKGEPVNEADAAALEHDKAYDQQLKSGDNPYLKYNHADAEF
QQRLATDTSFGGNLGKAVFQAKKRILEPLGLVEEGVKTAPGKKHPLEKTP
NRPTNPDSGKAPAKKKQKDGETADSARRTLDFEDSGAGDGPPEGSSSGEM
SHDAEMRAAPGGNAVEAGQGADGVGNASGDWHCGSTWSEGRVTTTSTRTW
VLPTYNNHLYLRIGTTANSNTYNGFSTPWGYFDFNRFHCHFSPRDWQRLI
NNNWGLRPKSMRVKIFNIQVKEVTTSNGETTVANNLTSTVQIFADSTYEL
PYVMDAGQEGSLPPFPNDVFMVPQYGYCGVVTGENQNQTDRNAFYCLECF
PSQMLRTGNNFEISYQFEKVPFHSMYAHSQSLDRMMNPLLDQYLWHLQST
TTGNSLNQGTATTTYGKITTGDFAYYRKNWLPGACIKQQKFSKNASQNYK
IPASGGDALLKYDTHTTLNGRWSNMAPGPPMATAGAGDSDFSNSQLIFAG
PNQSGNTTTSSNNLLFTSEEEIAATNPRDTDMFGQIADNNQNATTAPHIA
NLDAMGIVPGMVWQNRDIYYQGPIWAKVPHTDGHFHPSPLMGGFGLKHPP
PQIFIKNTPVPANPNTTFSAARINSFLTQYSTGQVAVQIDWEIQKEHSKR
WNPEVQFTSNYGTQNSMLWAPDNAGNYHEPRAIGSRFLTHHL

[0188] The VP1 sequence of an AAV capsid isolated from baboon (denoted as Bba.32) is set out as SEQ ID NO:21 (amino acids 1-742) and the locations of the associated variable regions and GBS and GH loop regions are defined in Table 5 below. The VP2 capsid protein spans amino acids 138-742 of SEQ ID NO:21 and the VP3 capsid protein spans amino acids 206-742 of SEQ ID NO:21.

(SEQ ID NO: 21)
MAADGYLPDWLEDNLSEGIREWWALKPGAPQPKANQQHQDNARGLVLPGY
KYLGPGNGLDKGEPVNEADAAALEHDKAYDQQLKSGDNPYLKYNHADAEF
QQRLATDTSFGGNLGKAVFQAKKRILEPLGLVEEGVKTAPGKKRPLEKTP
NRPTNPDSGKAPAKKKQKDGETADSARRTLDFEDSGAGDGPPEGSSSGEM
SHDAEMRAAPGGNAVEAGQGADGVGNASGGWHCDSTWSEGRVTTTSTRTW
VLPTYNNHLYLRIGTTANSNTYNGFSTPWGYFDFNRFHCHFSPRDWQRLI
NNNWGLRPKSMRVKIFNIQVKEVTTSNGETTVANNLTSTVQIFADSTYEL
PYVMDAGQEGSLPPFPNDVFMVPQYGYCGVVTGENQNQTDRNAFYCLEYF
PSQMLRTGNNFEISYQFEKVPFHSMYAHSQSLDRMMNPLLDQYLWHLQST
TTGNSLNQGTATTTYGKITTGDFAYYRKNWLPGACIKQQKFSKNASQNYK
IPASGGDALLKYDTHTTLNGRWSSMAPGPPMATAGAGDSDFSNSQLIFAG
PNQSGNTTTSSNNLLFTSEEEIATTNPRDTDMFGQIADNNQNATTAPHIA
NLDAMGIVPGMVWQNRDIYYQGPIWAKVPHTDGHFHPSPLMGGFGLKHPP
PQIFIKNTPVPANPNTTFSAARINSFLTQYSTGQVAVQIDWEIQKEHSKR
WNPEVQFTSNYGTQNSMLWAPGNAGNHHEPRAIGSRFLTHHL

[0189] The VP1 sequence of an AAV capsid isolated from baboon (denoted as Bba.33) is set out as SEQ ID NO:22 (amino acids 1-742) and the locations of the associated variable regions and GBS and GH loop regions are defined in Table 5 below. The VP2 capsid protein spans amino acids 138-742 of SEQ ID NO:22 and the VP3 capsid protein spans amino acids 206-742 of SEQ ID NO:22.

(SEQ ID NO: 122)
MAADGYLPDWLEDNLSEGIREWWALKPGAPQPKANQQHQDNARGLVLPGY
KYLGPGNGLDKGEPVNEADAAALEHDKAYDQQLKSGDNPYLKYNHADAEF
QQRLATDTSFGGNLGKAVFQAKKRILEPLGLVEEGVKTAPGKKRPLEKTP
NRPTNPDSGRAPAKKKQKDGETADSARRTLDFEDSGAGDGPPEGSSSGEM
SHDAEMRAAPGGNAVEAGQGADGVGNASGDWHCDSTWSEGRVTTTSTRTW
VLPTYNNHLYLRIGTTANSNTYNGFSTPWGYFDFNRFHCHFSPRDWQRLI
NNNWGLRPKSMRVKIFNIQVKEVTTSNGETTVANNLTSTVQIFADSTYEL
PYVMDAGQEGSLPPFPNDVFMVPQYGYCGVVTGENQNQTDRNAFYCLEYF
PSQMLRTGNNFEISYQFEKVPFHSMYAHSQSLDRMMNPLLDQYLWHLQST
TTGNSLNQGTATTTYGKITTGDFAYYRKNWLPGACIKQQKFSKNASQNYK
IPASGGDALLKYDTHTTLNGRWSNMAPGPPMATAGAGDSDFSNSQLIFAG
PNQSGNTTTSSNNLLLTSEEEIATTNPRDTDMFGQIADNNQNATTAPHIA
NLDAMGIVPGMVWQNRDIYYQGPIWAKVPHTDGHFHPSPLMGGFGLKHPP
PQIFIKNTPVPANPNTTFSAARINSFLTQYSTGQVAVQIDWEIQKEHSKR
WNPEVQFTSNYGTQNSMLWAPGNAGNYHEPRAIGSRFLTHHL

[0190] The VP1 sequence of an AAV capsid isolated from baboon (denoted as Bba.34) is set out as SEQ ID NO:23 (amino acids 1-739) and the locations of the associated variable regions and GBS and GH loop regions are defined in Table 5 below. The VP2 capsid protein spans amino acids 138-739 of SEQ ID NO:23 and the VP3 capsid protein spans amino acids 206-739 of SEQ ID NO:23.

(SEQ ID NO: 23)
MAADGYLPDWLEDNLSEGIREWWALKPGAPQPKANQQHQDNSRGLVLPGY
KYLGPFNGLDKGEPVNEADAAALEHDKAYDKQLEQGDNPYLKYNHADAEF
QERLQEDTSFGGILGRAVFQAKKRILEPLGLVEEAAKTAPGKKRPLEKTP
NQPTDTQAAGQTPAKKRPQGEQSGDSARRQLDFDPQPAAPIGQPPAAPSP
VGSNTMASGGGGPMADDNQGADGVGNASGNWHCDSTWLGDRVITTSTRTW
VLPTYNNHIYKQISSESGATNDNHYFGYSTPWGYFDFNRFHCHFSPRDWQ
RLINNNWGFRPKRLNFKIFNIQVKEVTQIEGGSTIANNLTSTIQVFADSE
YQLPYVLGSAHQGCLPPFPADVFMIPQYGYLTLNNGSQSVGRSSFYCLEY
FPSQMLRTGNNFQFSYTFESVPFHSSYAHSQSLDRIMNPLVDQYLYYLAR
TQTGTGSTTSNTRQLQFYQAGPSNMADQSRNWLPGPMYRQQRVSKTLDQN
SNTNFAWTAASKYNLNGRKSLVNPGIAMATHKDDEERFFPQHGVLVFGKT
NATNKTTLENVLVTDEEEVKATNPVATEEYGTVSSNLQSNTTNPTTETVN
NQGILPGMVWQDRDVYLQGPIWAKIPHTDGHFHPSPLMGGFGLKHPPPQI
LIKNTPVPANPPETFTTSKFASYITQYSTGQVSVEIEWELQKENSKRWNP
EIQYTSNYAKSNNVEFSADAAGVYSEPRPIGTRYLTRNL

[0191] The VP1 sequence of an AAV capsid isolated from baboon (denoted as Bba.35) is set out as SEQ ID NO:24 (amino acids 1-739) and the locations of the associated variable regions and GBS and GH loop regions are defined in Table 5 below. The VP2 capsid protein spans amino acids 138-739 of SEQ ID NO:24 and the VP3 capsid protein spans amino acids 206-739 of SEQ ID NO:24.

(SEQ ID NO: 24)
MAADGYLPDWLEDNLSEGIREWWALKPGAPQPKANQQHQDNSRGLVLPGY
KYLGPFNGLDKGEPVNEADAAALEHDKAYDKQLEQGDNPYLKYNHADAEF
QERLQEDTSFGGNLGRAVFQAKKRILEPLGLVEEVAKTAPGKKRPLEKTP
NQPTDTQAAGQTPAKKRPQGEQSGDSARRQLDFDPQPAAPIGQPPAAPSP
VGSNTMASGGGGPMADDNQGADGVGNASGNWHCDSTWLGDRVITTSTRTW
VLPTYNNHIYKQISSESGATNDNHYFGYSTPWGYFDFNRFHCHFSPRDWQ
RLINNNWGFRPKRLNFKIFNIQVKEVTQIEGGSTIANNLTSTIQVFADSE
YQLPYVLGSAHQGCLPPFPADVFMIPQYGYLTLNNGSQSVGRSSFYCLEY
FPSQMLRTGNNFQFSYTFESVPFHSSYAHSQSLDRIMNPLVDQYLYYLAR
TQTGTGSTTSNTRQLQFYQAGPSNMADQSRNWLPGPMYRQQRVSKTLDQN
SNTNFAWTAASKYNLNGRKSLANPGIAMATHKDDEERFFPQHRVLVFGQT
NATNKTTLDNVLITSEEEIKATNPVATEEYGTVSSNLQASNTDPTTETVN
NQGILPGMVWQDRDVYLQGPIWVKIPHTDGHFHPSPLMGGFGLKHPPPQI
LIKNTPVPANPPETFTTSKFASYTTQYSTGQVSVEIEWGLQKENSKRWNP
EIQYTSNYAKSNNVEFSVDAAGVYSEPRPIGTRYLTRNL

[0192] The VP1 sequence of an AAV capsid isolated from baboon (denoted as Bba.36) is set out as SEQ ID NO:25 (amino acids 1-739) and the locations of the associated variable regions and GBS and GH loop regions are defined in Table 5 below. The VP2 capsid protein spans amino acids 138-739 of SEQ ID NO:25 and the VP3 capsid protein spans amino acids 206-739 of SEQ ID NO:25.

(SEQ ID NO: 25)
MAADGYLPDWLEDNLSEGIREWWALKPGAPQPKANQQHQDNSRGLVLPGY
KYLGPFNGLDKGEPVNEAYAAALEHDKAYDKQLEQGDNPYLKYNHADAEF
QERLQEDTSFGGNLGRAVFQAKKRIPEPLGLVEEAAKTAPGKKRPLEKTP
NQPTDTQAAGQTPAKKRPQGEQSGDSARRQLDFDPQPAAPIGQPPAAPSP
VGSNTMASGGGGPMADDNQGADGVGNASGNWHCDSTWLGDRVITTSTRTW
VLPTYNNHIYKQISSESGATNDNHYFGYSTPWGYFDFNRFHCHFSPRDWQ
RLINNNWGFRPKRLNFKIFNIQVKEVTQIEGGSTIANNLTSTIQVFADSE
YQLPYVLGSAHQGCLPPFPADVFMIPQYGYLTLNNGSQSVGRPSFYCLEY
FPSQMLRTGNNFQFSYTFESVPFHSSYAHSQSLDRIMNPLVDQYLYYLAR
TQTGTGSTTSNTRQLQFYQAGPSNMADQSRNWLPGPMYRQQRVSKTLDQN
SNTNFAWTAASKYNLNGRKSLANPGIAMATHKDDEERFFPQHGVLVFGQT
NATNKTTLDNVLITSEEEIKATNPVATEEYGTVSSNLQASNTNPTTETVN
NQGILPGMVWQDRDVYLQGPIWAKIPHTDGHFHPSPLMGGFGLKHPPPQI
LIKNTPVPANPPETFTTSKFASYITQYSTGQVSVEIEWELQKENSKRWNP
EIQYTSNYAKSNNVEFSVDAAGVYSEPRPIGTRYLTRNL

[0193] The VP1 sequence of an AAV capsid isolated from baboon (denoted as Bba.37) is set out as SEQ ID NO:26 (amino acids 1-739) and the locations of the associated variable regions and GBS and GH loop regions are defined in Table 5 below. The VP2 capsid protein spans amino acids 138-739 of SEQ ID NO:26 and the VP3 capsid protein spans amino acids 206-739 of SEQ ID NO:26.

(SEQ ID NO: 26)
MAADGYLPDWLEDNLSEGIREWWALKPGAPQPKANQQHQDNSRGLVLPGY
KYLGPFNGLDKGEPVNEADAAALEHDKAYDKQLEQGDNPYLKYNHADAEF
QERLQEDTSFGGNLGRAVFQAKKRILEPLGLVEEAAETAPGKKRPLEKTP
NQPTDTQAAGQTPAKKRPQGEQSGDSARRQLDFDPQPAAPIGQPPAAPSP
VGSNTMASGGGGPMADDNQGADGVGNASGNWHCDSTWLGDRVITTSTRTW
VLPTYNNHIYKQISSESGATNDNHYFGYSTPWGYFDFNRFHCHFSPRDWQ
RLINNNWGFRPKRLNFKIFNIQVKEVTQTEGGSTIANNLTSTIQVFADSE
YQLPYVLGSAHQGCLPPFPADVFMIPQYGYLTLNNGSQSVGRSSFYCLEY
FPSQMLRTGNNFQFSYTFESVPFHSSYAHSQSLDRIINPLVDQYLYYLAR
TQTGTGSTTSNTRQLQFYQAGPSNMADQSRNWLPGPMYRQQRVSKTLDQN
SNTNFAWTAASKYNLNGRKSLANPGIAMATHKDDEERFFPQHGVLVFGQT
NATNKTTLDNVLITSEEEIKATNPVATEEYGTVSSNLQASNTNPTTETVN
NQGILPGMVWQDRDVYLQGPIWAKIPHTDGHFHPSPLMGGFGLKHPPPQI
LIKNTPVPANPPETFTTSKFASYITQYSTGQVSVEIEWELQKENSKRWNP
EIQYTSNYAKSNNVEFSVDAAGVYSEPRPIGTRYLTRNL

[0194] The VP1 sequence of an AAV capsid isolated from baboon (denoted as Bba.38) is set out as SEQ ID NO:27 (amino acids 1-739) and the locations of the associated variable regions and GBS and GH loop regions are defined in Table 5 below. The VP2 capsid protein spans amino acids 138-739 of SEQ ID NO:27 and the VP3 capsid protein spans amino acids 206-739 of SEQ ID NO:27.

(SEQ ID NO: 27)
MAADGYLPDWLEDNLSEGIRGWWALKPGAPQPKANQQHQDNSRGLVLPGY
KYLGPFNGLDKGEPVNEADAAALEHDKAYDKQLEQGDNPCLKYNHADAEF
QERLQEDTSFGGNLGRAVFQAKKRILEPLGLVEEAAKTAPGKKRPLEKTP
NQPTDTQAAGQTPAKKRPQGEQSGDSARRQLDFDPQPAAPIGQPPAAPSP
VGSNTMASGGGGPMADDNQGADGVGNASGNWHCDSTWLGDRVITTSTRTW
VLPTYNNHIYKQISSESGATNDNHYFGYSTPWGYFDFNRFHCHFSPRDWQ
RLINNNWGFRPKRLNFKIFNIQVKEVTQIEGGSTIANNLTSTIQVFADSE
YQLPYVLGSAHQGCLPPFPADVFMIPQYGYLTLNNGSQSVGRSSFYCLEY
FPSQMLRTGNNFQFSYTFESVPFHSSYAHSQSLDRIMNPLVDQYLYYLAR
TQTGTGSTTSNTRQLQFYQAGPSNMADQSRNWLPGPMYRQQRVSKTLDQN
SNTNFAWTAASKYNLNGRKSLANPGIAMATHKDDEERFFPQHGVLVFGQT
NATNKTTLDNVLITSEEEIKATNPVATEEYGTVSSNLQASNTNPTTETVN
NQGILPGMVWQDRDVYLQGPTWAKIPHTDGHFHPSPLMGGFGLKHPPPQI
LIKNTPVPANPPETFTTSKFASYITQYSTGQVSVEIEWELQKENSKRWNP
EIQYTSNYAKSNNVEFSVDAAGVYSEPRPIGTRYLTRNL

[0195] The VP1 sequence of an AAV capsid isolated from baboon (denoted as Bba.41) is set out as SEQ ID NO:28 (amino acids 1-739) and the locations of the associated variable regions and GBS and GH loop regions are defined in Table 5 below. The VP2 capsid protein spans amino acids 138-739 of SEQ ID NO:28 and the VP3 capsid protein spans amino acids 206-739 of SEQ ID NO:28.

(SEQ ID NO: 28)
MAADGYLPDWLEDNLSEGIREWWALKPGAPQPKANQQHQDNSRGLVLPGY
KYLGPFNGLDKGEPVNEADAAALEHDKAYDKQLEQGDNPYLKYNHADAEF
QERLQEDTSFGGNLGRAVFQAKKRILEPLGLVEEAAKTAPGKKRPLEKTP
NQPTDTQAAGQTPAKKRPQGEQSGDSARRQLDFDPQPAAPIGQPPAAPSP
VGSNTMASGGGGPMADDNQGADGVGNASGNWHCDSTWLGDRVITTSTRTW
VLPTYNNHIYKQISSESGATNDNHYFGYSTPWGYFDFNRFHCHFSPRDWQ
RLINNNWGFRPKRLNFKIFNIQVKEVTQIEGGSTIANNLTSTIQVFADSE
YQLPYVLGSAHQGCLPPFPADVFMIPQYGYLTLNNGSQSVGRSSFYCLEY
FPSQMLRTGNSFQFSYTFESVPFHSSYAHSQSLDRIMNPLVDQYLYYLAR
TQTGTGSTTSNTRQLQFYQAGPSNMADQSRNWLPGPMYRQQRVSKTLDQN
SNTNFAWTAASKYNLNGRKSLANPGIAMATHKDDEERFFPQHGVLVFGQT
NATNKTTLDNVLITSEEEIKATNPVATEEYGTVSSNLQASNTNPTTETVN
NQGILPGMVWQDRDVYLQGPIWAKIPHTDGHFHPSPLMGGFGLKHPPPQI
LIKNTPVPANPPETFTTSKFASYITQYSTGQVSVEIEWELQKENSKRWNP
EIQYTSNYAKSNNVEFSVDAAGVYSEPRPIGTRYLTRNL

[0196] The VP1 sequence of an AAV capsid isolated from baboon (denoted as Bba.42) is set out as SEQ ID NO:29 (amino acids 1-739) and the locations of the associated variable regions and GBS and GH loop regions are defined in Table 5 below. The VP2 capsid protein spans amino acids 138-739 of SEQ ID NO:29 and the VP3 capsid protein spans amino acids 206-739 of SEQ ID NO:29.

(SEQ ID NO: 29)
MAADGYLPDWLEDNLSEGIREWWALKPGAPQPKANQQHQDNSRGLVLPGY
KYLGPFNGLDKGEPVNGADAAALEHDKAYDKQLEQGDNPYLKYNHADAEF
QERLQEDTSFGGNLGRAVFQAKKRILEPLGLVEEAAKTAPGKKRPLEKTP
NQPTDTQAAGQTPAKKRPQGEQSGDSARRQLDFDPQPAAPIGQPPAAPSP
VGSNTMASGGGGPMADDNQGADGVGNASGNWHCDSTWLGDRVITTSTRTW
VLPTYNNHIYKQISSESGATNDNHYEGYSTPWGYFDFNRFHCHFSPRDWQ
RLINNNWGFRPKRLNFKIFNIQVKEVTQIEGGSTIANNLTSTIQVFADSE
YQLPYVLGSAHQGCLPPFPADVFMIPQYGYLTLNNGSQSVGRSSFYCLEY
FPSQMLRTGNNFQFSYTFESVPFHSSYAHSQSLDRIMNPLVDQYLYYLAR
TQTGTGSTTSNTRQLQFYQAGPSNMADQSRNWLPGPMYRQQRVSKTLDQN
SNTNFAWTAASKYNLNGRKSLVNPGIAMATHKDDEERFFPQHGVLVFGKT
NATNKTTLENVLVTDEEEVKATNPVATEEYGTVSSNLQSNTTNPTTETVN
NQGILPGMVWQDRDVYLQGPIWAKIPHTDGHFHPSPLMGGFGLKHPPPQI
LIKNTPVPANPPETFTTSKFASYITQYSTGQVSVEIEWELQKENSKRWNP
EIQYTSNYAKSNNVEFSVDAAGVYSEPRLIGTRYLTRNL

[0197] The VP1 sequence of an AAV capsid isolated from baboon (denoted as Bba.43) is set out as SEQ ID NO:30 (amino acids 1-739) and the locations of the associated variable regions and GBS and GH loop regions are defined in Table 5 below. The VP2 capsid protein spans amino acids 138-739 of SEQ ID NO:30 and the VP3 capsid protein spans amino acids 206-739 of SEQ ID NO:30.

(SEQ ID NO: 30)
MAADGYLPDWLEDNLSEGIREWWALKPGAPQPKANQQHQDNSRGLVLPGY
KYLGPFNGLDKGEPVNEADAAALEHDKAYDKQLEQGDNPYLKYNHADAEF
QERLQEDTSFGGNLGRAVFQAKKRILEPLGLVEEAAKTAPGKKRPLEKTP
NQPTDTQAAGQTPAKKRPQGEQSGDSARRQLDFDPQPAAPIGQPPAAPSP
VGSNTMASGGGGPMADDNQGADGVGNASGNWHCDSTWLGDRVITTSTRTW
VLPTYNNHIYKQISSESGATNDNHYFGYSTPWGYFDFNRFHCHFSPRDWQ
RLINNNWGFRPKRLNFKIFNIQVKEVTQIEGGSTIANNLTSTIQVFADSE
YQLPYVLGSAHQGCLPPFPADVFMIPQYGYLTLNNGSQSVGRSSFYCLEY
FPSQMLRTGNNFQFSYTFESVPFHSSYAHSQSLDRIMNPLVDQYLYYLAR
TQTGTGSTTSNTRQLQFYQAGPSNMADQSRNWLPGPMYRQQRVSKTLDQN
SNTNFAWTAASKYNLNGRKSLVNPGIAMATHKDDEERFFPQHGVLVFGKT
NATNKTTLENVLVTDEEEVKATNPVATEEYGTVSSNLQSNTTNPTTETVN
NQGILPGMVWQDRDVYLQGPIWAKIPHTDGHFHPSPLMGGFGLKHPPPQI
LIKNTPVPANPPETFTTSKFASYITQYSTGQVSVEIEWELQKENSKRWNP
EIQYTSNYAKSNNVEFSVDAAGVYSEPRPIGTRYLTRNL

[0198] The VP1 sequence of an AAV capsid isolated from baboon (denoted as Bba.44) is set out as SEQ ID NO:31 (amino acids 1-739) and the locations of the associated variable regions and GBS and GH loop regions are defined in Table 5 below. The VP2 capsid protein spans amino acids 138-739 of SEQ ID NO:31 and the VP3 capsid protein spans amino acids 206-739 of SEQ ID NO:31.

(SEQ ID NO: 31)
MAADGYLPDWLEDNLSEGIREWWALKPGAPQPKANQQHQDNSRGLVLPGY
KYLGPFNGLDKGEPVNEADAAALEHDKAYDKQLEQGDNPYLKYNHADAEF
QERLQEDTSFGGNLGRAVFQAKKRILEPLGLVEEAAKTAPGKKRPLEKTP
NQPTDTQAAGQTPAKKRPQGEQSGDSARRQLDFDPQPAAPIGQPPAAPSP
VGSNTMASGGGGPMADDNQGADGVGNASGNWHCDSTWLGDRVITTSTRTW
VLPTYNNHIYKQISSESGATNDNHYFGYSTPWGYFDFNRFHCHFSPRDWQ
RLINNNWGFRPKRLNFKIFNIQVKEVTQIEGGSTIANNLTSTIQVFADSE
YQLPYVLGSAHQGCLPPFPADVFMIPQYGYLTLNNGSQSVGRSSFYCLEY
FPSQMLRTGNNFQFSYTFESVPFHSSYAHSQSLDRIMNPLVDQYLYYLAR
TQTGTGSTTSNTRQLQFYQAGPSNMADQSRNWLPGPMYRQQRVSKTLDQD
SNTNFAWTAASKYNLNGRKSLVNPGIAMATHKDDEERFFPQHGVLVFGKT
NATNKTTLENVLVTDEEEVKATNPVATEEYGTVSSNLQSNTTNPTTETVN
NQGILPGMAWQDRDVYLQGPIWAKIPHTDGHFHPSPLMGGFGLKHPPPQI
LIKNTPVPANPPETFTTSKFASYITQYSTGQVSVEIEWELQKENSKRWNP
EIQYTSNYAKSNNVEFSVDAAGVYSEPRPIGTRYLTRNL

[0199] The VP1 sequence of an AAV capsid isolated from crab-eating macaque (denoted as Bce.14) is set out as SEQ ID NO:32 (amino acids 1-736) and the locations of the associated variable regions and GBS and GH loop regions are defined in Table 5 below. The VP2 capsid protein spans amino acids 138-736 of SEQ ID NO:32 and the VP3 capsid protein spans amino acids 203-736 of SEQ ID NO:32.

(SEQ ID NO: 32)
MAADGYLPDWLEDNLSEGIREWWALKPGAPQPKANQQKQDDGRGLVLPGYK
YLGPFNGLDKGEPVNEADAAALEHDKAYDQQLKAGDNPYLRYNHADAEFQE
RLQEDTSFGGNLGRAVFQAKKRVLEPLGLVEEAAKTAPGKKRPVEQSPQEP
DSSAGIGKSGAQPAKKRLNFGQTGDTESVPDPQPIGEPPAAPSGVGSLTMA
SGGGAPVADNNEGADGVGSSSGNWHCDSQWLGDRVITTSTRTWALPTYNNH
LYKQISNSTSGGSSNDNAYFGYSTPWGYFDFNRFHCHFSPRDWQRLINNNW
GFRPKRLNFKLFNIQVKEVTDNNGVKTIANNLTSTVQVFTDSDYQLPYVLG
SAHEGCLPPFPADVFMIPQYGYLTLNDGSQAVGRSSFYCLEYFPSQMLRTG
NNFTFSYEFENVPFHSSYAHSQSLDRLMNPLIDQYLYYLSKTINGSGQNQQ
ALKFSVAGPSNMAVQGRNYIPGPSYRQQRVSTTVTQNNNSEFAWPGASSWA
LNGRNSLMNPGPAMASHKEGEDRFFPLSGSLIFGKQGTGRDNVDADKVMIT
NEEEIKTTNPVATESYGQVATNHQSAQAQAQTGWVQNQGILPGMVWQDRDV
YLQGPIWAKIPHTDGNFHPSPLVGGFGMKHPPPQILIKNTPVPADPPTAFN
KDKLNSFITQYSTGQVRVEIEWELQKENSKRWNPEIQYTSNYYKSNNVEFA
VNTEGVYSEPRPIGTRYLTRNL

[0200] The VP1 sequence of an AAV capsid isolated from crab-eating macaque (denoted as Bce.15) is set out as SEQ ID NO:33 (amino acids 1-736) and the locations of the associated variable regions and GBS and GH loop regions are defined in Table 5 below. The VP2 capsid protein spans amino acids 138-736 of SEQ ID NO:33 and the VP3 capsid protein spans amino acids 203-736 of SEQ ID NO:33.

(SEQ ID NO: 33)
MAADGYLPDWLEDNLSEGIREWWALKPGAPQPKANQQKQDDGRGLVLPGYK
YLGPFNGLDKGEPVNEADAAALEHDKAYDQQLKAGDNPYLRYNHADAEFQE
RLQEDTSFGGNLGRAVFQAKKRVLEPLGLVEEAAKTAPGKKRPVEQSPQEP
DSSAGIGKSGAQPAKKRLNFGQTGDTESVPDPQPIGEPPAAPSGVGSLTMA
SGGGAPVADNNEGADGVGSSSGNWHCDSQWLGDRVITTSTRTWALPTYNNH
LYKQISNSTSGGSSNDNAYFGYSTPWGYFDFNRFHCHFSPRDWQRLINNNW
GFRPKRLNFKLFNIQVKEVTDNNGVKTIANNLTSTVQVFTDSDYQLPYVLG
SAHEGCLPPFPADVFMIPQYGYLTLNDGSQAVGRSSFYCLEYFPSQMPRTG
NNFTFSYEFENVPFHSSYAHSQSLDRLMNPLIDQYLYYLSKTINGSGQNQQ
TLKFSVAGPSNMAVQGRNYIPGPSYRQQRVSTTVTQNNNSEFAWPGASSWA
LNGRNSLMNPGPAMASHKEGEDRFFPLSGSLIFGKQGTGRDNVDADKVMIT
NEEEIKTTNPVATESYGQVATNHQSAQAQAQTGWVQNQGILPGMVWQDRDV
YLQGPIWAKIPHTDGNFHPSPLMGGFGMKHPPPQILIKNTPVPADPPTAFN
KDKLNSFITQYSTGQVSVAIEWELQKENSKRWNPEIQYTSNYYKSNNVEFA
VNTEGVYSEPRPIGTRYLTRNL

[0201] The VP1 sequence of an AAV capsid isolated from crab-eating macaque (denoted as Bce.16) is set out as SEQ ID NO:34 (amino acids 1-736) and the locations of the associated variable regions and GBS and GH loop regions are defined in Table 5 below. The VP2 capsid protein spans amino acids 138-736 of SEQ ID NO:34 and the VP3 capsid protein spans amino acids 203-736 of SEQ ID NO:34.

(SEQ ID NO: 34)
MAADGYLPDWLEDNLSEGIREWWALKPGAPQPKANQQKQDDGRGLVLPGYK
YLGPFNGLDKGEPVNEADAAALEHDKAYDQQLKAGDNPYLRYNHADAEFQE
RLQEDTSFGGNLGRAVFQAKKRVLEPLGLVEEAAKTAPGKKRPVEQSPQEP
DSSAGIGKSGAQPAKKRLNFGQTGDTESVPDPQPIGEPPAAPSGVGSLTMA
SGGGAPVADNNEGADGVGSSSGNWHCDSQWLGDRVITTSTRTWALPTYNNH
LYKQISNSTSGGSSNDNAYFGYSTPWGYFDFNRFHCHFSPRDWQRLINNNW
GFRPKRLNFKLFNIQVKEVTDNNGVKTIANNLTSTVQVFTDSDYQLPYVLG
SAHEGCLPPFPADVFMIPQYGYLTLNDGSQAVGRSSFYCLEYFPSQMLRTG
NNFTFSYEFENVPFHSSYAHSQSLDRPMNPLIDQYLYYLSKTINGSGQNQQ
TLKFSVAGPSNMAVQGRNYIPGPSYRQQRVSTTVTQNNNSEFAWPGASSWA
LNGRNSLMNPGPAMASHKEGEDRFFPLSGSLIFGKQGTGRDNVDADKVMIT
NEEEIKTTNPVATESYGQVATNHQSAQAQAQTGWVQNQGILPGMVWQDRDV
YLQGPIWAKIPHTDGNFHPSPLMGGFGMKHPPPQILIKNTPVPADPPTAFN
KDKLNSFITQYSTGQVSVEIEWELQKENSKRWNPEIQYTSNYYKSNNVEFA
VNTEGVYSEPRPIGTRYLTRNL

[0202] The VP1 sequence of an AAV capsid isolated from crab-eating macaque (denoted as Bce.17) is set out as SEQ ID NO:35 (amino acids 1-736) and the locations of the associated variable regions and GBS and GH loop regions are defined in Table 5 below. The VP2 capsid protein spans amino acids 138-736 of SEQ ID NO:35 and the VP3 capsid protein spans amino acids 203-736 of SEQ ID NO:35.

(SEQ ID NO: 35)
MAADGYLPDWLEDNLSEGIREWWALKPGAPQPKANQQKQDDGRGLVLPGYK
YLGPFNGLDKGEPVNEADAAALEHDKAYDQQLKAGDNPYLRYNHADAEFQE
RLQEDTSFGGNLGRAVFQAKKRVLEPLGLVEEAAKTAPGKKRPVEQSPQEP
DSSAGIGKSGAQPAIKRLNFGQTGDTESVPDPQPIGEPPAAPSGVGSLTMA
SGGGAPVADNNEGADGVGSSSGNWHCDSQWLGDRVITTSIRTWALPTYNNH
LYKQISNSTSGGSSNDNAYFGYSTPWGYFDFSRFHCHFSPRDWQRLINNNW
GFRPKRLNFKLFNIQVKEVTDNNGVKTIANNLTSTVQVFTDSDYQLPYVLG
SAHEGCLPPFPADVFMIPQYGYLTLNDGSQAVGRSSFYCLEYFPSQMLRTG
NNFTFSYEFENVPFHSSYAHSQSLDRLMNPLIDQYLYYLSKTINGSGQNQQ
TLKFSVAGPSNMAVQGRNYIPGPSYRQQRVSTTVTQNNNSEFAWPGASSWA
LNGRNSLMNPGPAMASHKEGEDRFFPLSGSLIFGKQGTGRDNVDADKVMIT
NEEEIKTTNPVATESYGQVATNHQSAQAQAQTGWVQNQGILPGMVWQDRDV
YLQGPIWAKIPHTDGNFHPSPLMGGFGMKHPPPQILIKNTPVPADPPTAFN
KDKLNSFITQYSTGQVSVEIEWELQKENSKRWNPEIQYTSNYYKSNNVEFA
VNTEGVYSEPRPIGTRYLTRNL

[0203] The VP1 sequence of an AAV capsid isolated from crab-eating macaque (denoted as Bce.18) is set out as SEQ ID NO:36 (amino acids 1-736) and the locations of the associated variable regions and GBS and GH loop regions are defined in Table 5 below. The VP2 capsid protein spans amino acids 138-736 of SEQ ID NO:36 and the VP3 capsid protein spans amino acids 203-736 of SEQ ID NO:36.

(SEQ ID NO: 36)
MAADGYLPDWLEDNLSEGIREWWALKPGAPQPKANQQKQDDGRGLVLPGYK
YLGPFNGLDKGEPVNEADAAALEHDKAYDQQLKAGDNPYLRYNHADAEFQE
RLQEDTSFGGNLGRAVFQAKKRVLEPLGLVEEAAKTAPGKKRPVEQSPQEP
DSSAGIGKSGAQPAKKRLNFGQTGDTESVPDPQPIGEPPAAPSGVGSLTMA
SGGGAPVADNNEGADGVGSSSGNWHCDSQWLGDRVITTSTRTWALPTYNNH
LYKQISNSTSGGSSNDNAYFGYSTPWGYFDFNRFHCHFSPRDWQRLINNNW
GFRPKRLNFKLFNIQVKEVTDNNGVKTIANNLTSTVQVFTDSDYQLPYVLG
SAHEGCLPPFPADVFMIPQYGYLTLNDGSQAVGRSSFYCLEYFPSQMLRTG
NNFTFSYEFENVPFHSSYAHSQSLDRLMNPLIDQYLYYLSKTINGSGQNQQ
TLKFSVAGPSNMAVQGRNYIPGPSYRQQRVSTTVTQNNNSEFAWPGASSWA
LNGRNSLMNPGPAMASHKEGEDRFFPLSGSLIFGKQGTGRDNVDADKVMIT
NEEEIKTTNPVATESYGQVATNHQSAQAQAQTGWVQNQGILPGMVWQDRDV
YLQGPIWAKIPHTDGNFHPSPLMGGFGMKHPPPQILIKNTPVPADPPTAFN
KDKLNSFITQYSTGQVSVEIEWELQKENSKRWNPEIQYTSNYYKSNNVEFA
VNTEGVYSEPRPIGTRYLTRNL

[0204] The VP1 sequence of an AAV capsid isolated from crab-eating macaque (denoted as Bce.20) is set out as SEQ ID NO:37 (amino acids 1-733) and the locations of the associated variable regions and GBS and GH loop regions are defined in Table 5 below. The VP2 capsid protein spans amino acids 138-733 of SEQ ID NO:37 and the VP3 capsid protein spans amino acids 203-733 of SEQ ID NO:37.

(SEQ ID NO: 37)
MAADGYLPDWLEDNLSEGIREWWALKPGAPQPKANQQKQDDGRGLVLPGYK
YLGPFNGLDKGEPVNEADAAALEHDKAYDQQLKAGDNPYLRYNHADAEFQE
RLQEDTSFGGNLGRAVFQAKKRVLEPLGLVEEAAKTAPGKKRPVEQSPQEP
DSSAGIGKSGAQPAKKRLNFGQTGDTESVPDPQPIGEPPAAPSGVGSLTMA
SGGGAPVADNNEGADGVGSSSGNWHCDSRWLGDRVITTSTRTWALPTYNNH
LYKQISNSTSGGSSNDNAYFGYSTPWGYFDFNRFHCHFSPRDWQRLINNNW
GFRPKRLNFKLFNIQVKEVTDNNGAKTIANNLTSTVQVFTDSDYQLPYVLG
SAHEGCLPPFPADVFMIPQYGYLTLNDGSQAVGRSSFYCLEYFPSQMLRTG
NNFTFSYEFENVPFHSSYAHSQSLDRLMNPLIDQYLYYLSKTINGSGQNQQ
TLKFSVAGPSNMAVQGRNYIPGPSYRQQRVSTTVTQNNNSEFAWPGASSWA
LNGRNSLMNPGPAMASHKEGEDRFFPLSGSLIFGKQGTGRDNVDADKVMIT
NEEEIKTTNPVATESYGQVATNHQSAQAQAQTGWVQNQGILPGMVWQDRDV
YLQGPIWAKIPHTDGNFHPSPLMGGFGMKHPPPQILIKNTPVPADPPTAFN
KDKLNSFITQYSTGQVSVEIEWELQKENSKRWNPEIQYTSNYYKSNNVEFA
VNTEGVYSEPRPIGTRYLT

[0205] The VP1 sequence of an AAV capsid isolated from crab-eating macaque (denoted as Bce.35) is set out as SEQ ID NO:38 (amino acids 1-730) and the locations of the associated variable regions and GBS and GH loop regions are defined in Table 5 below. The VP2 capsid protein spans amino acids 138-730 of SEQ ID NO:38 and the VP3 capsid protein spans amino acids 199-730 of SEQ ID NO:38.

(SEQ ID NO: 38)
MAADGYLPDWLEDNLSEGIREWWALKPGAPQPKANQQKQDDGRGLVLPGYK
YLGPFNGLDKGEPVNEADAAALEHDKAYDQQLKAGDNPYLRYNHADAEFQE
RLQEDTSFGGNLGRAVLQAKKRVLEPLGLVEEAAKTAPGKKRPVDSPDSTS
GIGKKGQQPARKRLNFGQTGDAESVPDPQPIGEPPAAPSGLGSGTMAAGGG
APMADNNEGADGVGNASGNWHCDSTWLGNRVITTSTRTWALPTYNNHLYKQ
ISSSSSGATNDNHYFGYSTPWGYFDFNRFHCHFSPRDWQRLINNNWGFRPK
RLRFKLFNIQVKEVTTNDGVTTIANNLTSTVQVFSDSEYQLPYVLGSAHQG
CLPPFPADVFMIPQYGYLTLNNGSQSVGRSSFYCLEYFPSQMLRTGNNFEF
SYEFEDVPFHSSYAHSQSLDRLMNPLIDQYLYYLARTQSSTGTSTRELQFH
QAGPATMAEQSKNWLPGPCFRQQRISKTTDNNNNSNFAWTGATKYHLNGRS
SLTNPGVPMATHKDDESVFFPINGVLVFGKTGASNKTTLENVLMTDEEEIK
ATNPVATEEYGVVSSNIQSQNSNPTTQTVNNQGALPGMVWQNRDVYLQGPI
WAKIPHTDGNFHPSPLMGGFGLKHPPPQILIKNTPVPANPPETFTPAKFAS
FITQYSTGQVSVEIEWELQKENSKRWNPEIQYTSNYDKQTGVGFAVDTQGV
YSEPRPIGTRYLTRNL

[0206] The VP1 sequence of an AAV capsid isolated from crab-eating macaque (denoted as Bce.36) is set out as SEQ ID NO:39 (amino acids 1-730) and the locations of the associated variable regions and GBS and GH loop regions are defined in Table 5 below. The VP2 capsid protein spans amino acids 138-730 of SEQ ID NO:39 and the VP3 capsid protein spans amino acids 199-730 of SEQ ID NO:39.

(SEQ ID NO: 39)
MAADGYLPDWLEDNLSEGIREWWALKPGAPQPKANQQKQDDGRGLVLPGYK
YLGPFNGLDKGEPVNEADAAALEHDKAYDQQLKAGDNPYLRYNHADAEFQE
RLQEDTSFGGNLGRAVFQAKKRVLEPLGLVEEAAKTAPGKKRPVDSPDSTS
GIGKKGQQPARKRLNFGQTGDAESVPDPQPIGEPPAAPSGLGSGTMAAGGG
APMADNNEGADGVGNASGNWHCDSTWLGNRVITTSTRTWALPTYNNHLYKQ
ISSSSSGATNDNHYFGYSTPWGYFDFNRFHCHFSPRDWQRLINNNWGFRPK
RLRFKLFNIQVKEVTTNDGVTTIANNLTSTVQVFSDSEYQLPYVLGSAHQG
CLPPFPADVFMIPQYGYLTLNNGSQSVGRSSFYCLEYFPSQMLRTGNNFEF
SYEFEDVPFHSSYAHSQSLDRLMNPLIDQYLYYLARTQSSTGTSTRELQFH
QAGPATMAEQSKNWLPGPCFRQQRISKTTDNNNNSNFAWTGATKYHLNGRN
SLTNPGVPMATHKDDESVFFPINGVLVFGKTGASNKTTLENVLMTDEEEIK
ATNPVATEEYGVVSSNIQSQNSNPTTQTVNNQGALPGMVWQNRDVYLQGPI
WAKIPHTDGNFHPSPLMGGFGLKHPPPQILIKNTPVPANPPETFTPAKFAS
FITQYSTGQVSVEIEWELQKENSKRWNPEIQYTSNYDKQTGVDFAVDTQGV
YSEPRPIGTRYLTRNL

[0207] The VP1 sequence of an AAV capsid isolated from crab-eating macaque (denoted as Bce.39) is set out as SEQ ID NO:40 (amino acids 1-736) and the locations of the associated variable regions and GBS and GH loop regions are defined in Table 5 below. The VP2 capsid protein spans amino acids 138-736 of SEQ ID NO:40 and the VP3 capsid protein spans amino acids 203-736 of SEQ ID NO:40.

(SEQ ID NO: 40)
MAADGYLPDWLEDNLSEGIREWWDLKPGAPKPKANQQKQDDGRGLVLPGYK
YPGPFNGLDKGEPVNAADAAALEHDKAYDQQLKAGDNPYLRYNHADAEFQE
RLQEDTSFGGNLGRAVFQAKKRVFEPLGLVEEGAKTAPGKKRPVEQSPQEP
DSSSGIGKTGQQPAKKRLNFGQTGDSESVPDPQPLGEPPAAPSGLGPNTMA
SGGGAPMADNNEGADGVGNSSGNWHCDSTWLGDRVITTSTRTWALPTYNNH
LYKQISNSTSGGSTNDNTYFGYSTPWGYFDFNRFHCHFSPRDWQRLINNNW
GFRPKRLNFKLFNIQVKEVTTNEGTKTIANNLTSTVQVFTDSEYQLPYVLG
SAHQGCLPPFPADVFMVPQYGYLTLNNGSQALGRSSFYCLEYFPSQMLRTG
NNFQFSYTFEDVPFHSSYAHSQSLDRLMNPLIDQYLYYLVRTQTTGTGGTQ
TLAFSQAGPSSMANQARNWVPGPSYRQQRVSTTKNQNNNSNFAWTGAAKFK
LNGRNSLMNPGVAMASHKDDEDRFFPSSGVLIFGKQGAGNDGVDYSQVLIT
DEEEIKATNPVATEEYGEVAINDQAANTQAQTGLVHNQGVIPGMVWQNRDV
YLQGPIWAKIPHTDGNFHPSPLMGGFGLMHPPPQILIKNTPVPADPPLTFN
QAKLNSFITQYSTGQVSVEIEWELQKENSKRWNPEIQYTSNYYKSTNVDFA
VNSDGVYSEPRPIGTRYLTRNL

[0208] The VP1 sequence of an AAV capsid isolated from crab-eating macaque (denoted as Bce.40) is set out as SEQ ID NO:41 (amino acids 1-736) and the locations of the associated variable regions and GBS and GH loop regions are defined in Table 5 below. The VP2 capsid protein spans amino acids 138-736 of SEQ ID NO:41 and the VP3 capsid protein spans amino acids 203-736 of SEQ ID NO:41.

(SEQ ID NO: 41)
MAADGYLPDWLEDNLSEGIREWWDLKPGAPKPKANQQKQDDGRGLVLPGYK
YLGPFNGLDKGEPVNAADAAALEHDKAYDQQLKAGDNPYLRYNHADAEFQG
RLQEDTSFGGNLGRAVFQAKKRVLEPLGLVEEGAKTAPGKKRPVEQSPQEP
DSSSGIGKTGQQPAKKRLNFGQTGDSESVPDPQPLGEPPAAPSGLGPNTMA
SGGGAPMADNNEGADGVGNSSGNWHCDSTWLGDRVITTSTRTWALPTYNNH
LYKQISNSTSGGSTNDNTYFGYSTPWGYFDFNRFHCHFSPRDWQRLINNNW
GFRPKRPNFKLFNIQVKEVTTNEGTKTIANNLTSTVQAFTDSEYQLPYVLG
SAHQGCLPPFPADVFMVPQYGYLTLNNGSQALGRSSFYCLEYFPSQMLRTG
NNFQFSYTFEDVPFHSSYAHSQSLDRLMNPLIDQYLYYLVRTQTTGTGGTQ
TLAFSQAGPSSMANQARNWVPGPSYRQQRVSTTKNQNNNSNFAWTGAAKFK
LNGRNSLMNPGVAMASHKDDEDRFSPSSGVLIFGKQGAGNDGVDYSQVLIT
DEEEIKATNPVATEEYGEVAINDQAANTQAQTGLVHNQGVIPGMVWQNRDV
YLQGPIWAKIPHTDGNFHPSPLMGGFGLKHPPPQILIKNTPVPADPPLTFN
QAKLNSFITQYSTGQVSVEIEWELQKENSKRWNPEIQYTSNYYKSTNVDFA
VNSDGVYSEPRPIGTRYLTRNL

[0209] The VP1 sequence of an AAV capsid isolated from crab-eating macaque (denoted as Bce.41) is set out as SEQ ID NO:42 (amino acids 1-736) and the locations of the associated variable regions and GBS and GH loop regions are defined in Table 5 below. The VP2 capsid protein spans amino acids 138-736 of SEQ ID NO:42 and the VP3 capsid protein spans amino acids 203-736 of SEQ ID NO:42.

(SEQ ID NO: 42)
MAADGYLPDWLEDNLSEGIREWWDLKPGAPKPKANQQKQDDGRGLVLPGYK
YLGPFNGLDKGEPVNAADAAALEHDKAYDQQLKAGDNPYLRYNHADAEFQG
RLQEDTSFGGNLGRAVFQAKKRVLEPLGLVEEGAKTAPGKKRPVEQSPQEP
DSSSGIGKTGQQPAKKRLNFGQTGDSESVPDPQPLGEPPAAPSGLGPNTMA
SGGGAPMADNNEGADGVGNSSGNWHCDSTWLGDRVITTSTRTWALPTYNNH
LYKQISNSTSGGSTNDNTYFGYSTPWGYFDFNRFHCHFSPRDWQRLINNNW
GFRPKRLNFKLFNIQVKEVTTNEGTKTIANNLTSTVQVFTDSEYQLPYVLG
SAHQGCLPPFPADVFMVPQYGYLTLNNGSQALGRSSFYCLEYFPSQMLRTG
NNFQFSYTFEDVPFHSSYAHSQSLDRLMNPLIDQYLYYLVRTQTTGTGGTQ
ILAFSQAGPSSMANQARNWVPGPSYRQQRVSTTKNQNNNSNFAWTGAAKFK
LNGRNSLMNPGVAMASHKDDEDRFFPSSGVLIFGKQGAGNDGMDYSQVLIT
DEEEIKATNPVATEEYGEVAINDQAANTQAQTGLVHNQGVIPGMVWQNRDV
YLQGPIWAKIPHTDGNFHPSPLMGGFGLKHPPPQILIKNTPVPADPPLTFN
QAKLNSFITQYSTGQVSVEIEWELQKENSKRWNPEIQYTSNYYKSTNVDFA
VNSDGVYSEPRPIGTRYLTRNL

[0210] The VP1 sequence of an AAV capsid isolated from crab-eating macaque (denoted as Bce.42) is set out as SEQ ID NO:43 (amino acids 1-736) and the locations of the associated variable regions and GBS and GH loop regions are defined in Table 5 below. The VP2 capsid protein spans amino acids 138-736 of SEQ ID NO:43 and the VP3 capsid protein spans amino acids 203-736 of SEQ ID NO:43.

(SEQ ID NO: 43)
MAADGYLPDWLEDNLSEGIREWWDLKPGAPKPKANQQKQDDGRGLVLPGYK
YLGPFNGLDKGEPVNAADAAALEHDKAYDQQLKAGDNPYLRYNHADAEFQE
RLQEDTSFGGNLGRAVFQAKKRVLEPLGLVEEGAKTAPGKKRPVEQSPQEP
DSSSGIGKTGQQPAKKRLNFGQTGDSESVPDPQPLGEPPAAPSGLGPNTMA
SGGGAPMADNNEGADGVGNSSGNWHCDSTWLGDRVITTSTRTWALPTYNNH
LYKQISNSTSGGGTNDNTYFGYSTPWGYFDFNRFHCHFSPRDWQRLINNNW
GFRPKRLNFKLFNIQVKEVTTNEGTKTIANNLTSTVQVFTDSEYQLPYVLG
SAHQGCLPPFPADVFMVPQYGHLTLNNGSQALGRSSFYCLEYFPSQMLRTG
NNFQFSYTFEDVPFHSSYAHSQSLDRLMNPLIDQYLYYLVRTQTTGTGGTQ
TLAFSQAGPSSMANQARNWVPGPSYRQQRVSTTKDQNNNSNFAWTGAAKFK
LNGRNSLMNPGVAMASHKDDEDRFFPSSGVLIFGKQGAGNDGVDYSQVLIT
DEEEIKATNPVATEEYGEVAVNDQAANTQAQTGLVHNQGVIPGMVWQNRDV
YLQGPIWAKIPHTDGNFHPSPLMGGFGLKHPPPQILIKNTPVPADPPLTLN
QAKLNSFITQYSTGQVSVEIEWELQKENSKRWNPEIQYTSNYYKSTNVDFA
VNSDGVYSEPRPIGTRYLTRNL

[0211] The VP1 sequence of an AAV capsid isolated from crab-eating macaque (denoted as Bce.43) is set out as SEQ ID NO:44 (amino acids 1-730) and the locations of the associated variable regions and GBS and GH loop regions are defined in Table 5 below. The VP2 capsid protein spans amino acids 138-730 of SEQ ID NO:44 and the VP3 capsid protein spans amino acids 199-730 of SEQ ID NO:44.

(SEQ ID NO: 44)
MAADGYLPDWLEDNLSEGIREWWALKPGAPQPKANQQKQDDGRGLVLPGYK
YLGPFNGLDKGEPVNEADAAALEHDKAYDQQLKAGDNPYLRYNHADAEFQE
RLQEDTSFGGNLGRAVFQAKKRVLEPLGLVEEAAKTAPGKKRPVDSPDSTS
GIGKKGQQPARKRLNFGQTGDAESVPDPQPIGEPPAAPSGLGSGTMAAGGG
APMADNNEGADGVGNAPGNWHCDSTWLGNRVITTSTRTWALPTYNNHLYKQ
ISSSSSGATNDNHYFGYSTPWGYFDFNRFHCHFSPRDWPRLINNNWGFRPK
RLRFKLFNIQVKEVTTNDGVTTIANNLTSTVQVFSDSEYQLPYVLGSAHQG
CLPPFPADVFMIPQYGYLTLNNGSQSVGRSSFYCLEYFPSQMLRTGNNFEF
SYEFEDVPFHSSYAHSQSLDRLMNPLIDQYPYYLARTQSSTGTSTRELQFH
QAGPATMAEQSKNWLPGPCFRQQRISKTTDNNNNSNFAWTGATKYHLNGRN
SLTNPGVPMATHKDDESVFFPINGVLVFGKTGASNKTTLENVLMTDEEEIK
ATNPVATEEYGVVSSNIQSQNSNPATQTVNNQGALPGMVWQNRDVYLQGPI
WAKIPHTDGNFHPSPLMGGFGLKHPPPQILIKNTPVPANPPETFTPAKFAS
FITQYSTGQVSVEIEWELQKENSKRWNPEIQYTSNYDKQTGVDFAVDTQGV
YSEPRPIGTRYLTRNL

[0212] The VP1 sequence of an AAV capsid isolated from crab-eating macaque (denoted as Bce.44) is set out as SEQ ID NO:45 (amino acids 1-730) and the locations of the associated variable regions and GBS and GH loop regions are defined in Table 5 below. The VP2 capsid protein spans amino acids 138-730 of SEQ ID NO:45 and the VP3 capsid protein spans amino acids 199-730 of SEQ ID NO:45.

(SEQ ID NO: 45)
MAADGYLPDWLEDNLSEGIREWWALKPGAPQPKANQQKQDDGRGLMLPGYK
YLGPFNGLDKGEPVNEADAAALEHDKAYDQQLKAGDNPYLRYNHADAEFQE
RLQEDTSFGGNLGRAVFQAKKRVLEPLGLVEEAAKTAPGKKRPVDSPDSTS
GIGKKGQQPARKRLNFGQTGDAESVPDPQPIGEPPAAPSGLGSGTMAAGGG
APMADNNEGADGVGNASGSWHCDSTWLGNRVITTSTRTWALPTYNNHLYKQ
ISSSSSGATNDNHYFGYSTPWGYFDFNRFHCHFSPRDWQRLINNNWGFRPK
RLRFKLFNIQVKEVTTNDGVTTIANNLTSTVQVFSDSEYQLPYVLGSAHQG
CLPPFPADVFMIPQYGYLTLNNGRQSVGRSSFYCLEYFPSQMLRTGNNFEF
SYEFEDVPFHSSYAHSQSLDRLMNPLIDQYPYYLARTQSSTGTSTRELQFH
QAGPATMAEQSKNWLPGPCFRQQRISKTTDNNNNSNFAWTGATKYHLNGRN
SLTNPGVPMATHKDDESVFFPINGVLVFGKTGASNKTTLENVPMTDEEEIK
ATNPVATEEYGVVSSNIQSQNSNPTTQTVNNQGALPGMVWQNRDVYLQGPI
WAKIPHTDGNFHPSPLMGGFGLKHPPPQILIKNTPVPANPPETFTPAKFAS
FITQYSTGQVSVEIEWELQKENNKRWNPEIQYTSNYDKQTGVDFAVDTQGV
YSEPRPIGTRYLTRNL

[0213] The VP1 sequence of an AAV capsid isolated from crab-eating macaque (denoted as Bce.45) is set out as SEQ ID NO:46 (amino acids 1-730) and the locations of the associated variable regions and GBS and GH loop regions are defined in Table 5 below. The VP2 capsid protein spans amino acids 138-730 of SEQ ID NO:46 and the VP3 capsid protein spans amino acids 199-730 of SEQ ID NO:46.

(SEQ ID NO: 46)
MAADGYLPDWLEDNLSEGIREWWALKPGAPQPKANQQKQDDGRGLVLPGYK
YLGPFSGLDKGEPVNEADAAALEHDKAYDQQLKAGDNPYLRYNHADAEFQE
RLQEDTSFGGNLGRAVFQAKKRVLEPLGLVEEAAKTAPGKKRPVDSPDSTS
GIGKKGQQPARKRLNFGQTGDAESVPDPQPIGEPPAAPSGLGSGTMAAGGG
APMADNNEGADGVGNASGNWHCDSTWLGNRVITTSTRTWALPTYNDHLYKQ
ISSSSSGATNDNHYFGYSTPWGYFDFNRFHCHFSPRDWQRLINNNWGFRPK
RLRFKLFNIQVKEVTTNDGVTTIANNLTSTVQVFSDSEYQLPYVLGSAHQG
CLPPFPADVFMIPQYGYLTLNNGSQSVGRSSFYCLEYFPSQMLRTGNNFEF
SYEFEDVPFHSSYAHSQSLDRLMNPLIDQYLYYLARTQSSTGTSTRELQFH
QAGPATMAEQSKNWLPGPCFRQQRISKTTDNNNNSNFAWTGATKYHLNGRN
SLTNPGVPMATHKDDESVFFPINGVLVFGKTGASNKTTLENVLMTDEEEIK
ATNPVATEEYGVVSSNIQSQNSNPTTQTVNNQGALPGMVWRNRDVYLQGPI
WAKIPHTDGNFHPSPLMGGFGLKHPPPQILIKNTPVPANPPETFTPAKFAS
FITQYSTGQVSVEIEWELQKENSKRWNPEIQYTSNYDKQTGVDFAVDTQGV
YSEPRPIGTRYLTRNL

[0214] The VP1 sequence of an AAV capsid isolated from crab-eating macaque (denoted as Bce.46) is set out as SEQ ID NO:47 (amino acids 1-730) and the locations of the associated variable regions and GBS and GH loop regions are defined in Table 5 below. The VP2 capsid protein spans amino acids 138-730 of SEQ ID NO:47 and the VP3 capsid protein spans amino acids 199-730 of SEQ ID NO:47.

(SEQ ID NO: 47)
MAADGYLPDWLEDNLSEGIREWWALKPGAPQPKANQQKQDDGRGLVLPGY
KYLGPFNGLDKGEPVNEADAAALEHDKAYDQQLKAGDNPYLRYNHADAEF
QERLQEDTSFGGNLGRAVFQAKKRVLEPLGLVEEAAKTAPGKKRPVDSPD
STSGIGKKGQQPARKRLNFGQTGDAESVPDPQPIGEPPAAPSGLGSGTMA
AGGGAPMADNNEGADGVGNASGNWHCDSTWLGNRVITTSTRTWALPTYNN
HLYKQISSSSSGATNDNHYEGYSTPWGYFDENREHCHFSPRDWQRLINNN
WGFRPKRLRFKLFNIQVKEVTTNDGVTTIANNLTSTVQVFSDSEYQLPYV
LGSAHQGCLPPFPADVFMIPQYGYLTLNNGSQSVGRSSFYCLEYFPSQML
RTGNNFEFSYEFEDVPFHSSYAHSQSLDRLMNPLIDQYLYYMARTQSSTG
TSTREPQFHQAGPATMAEQSKNWLPGPCFRQQRISKTTDNNNNSNFAWTG
ATKYHLNGRNSLTNPGVPMATHKDDESVFFPINGVLVFGKTGASNKTTLE
NVLMTDEEEIKATNPVATEEYGVVSSNIQSQNSNPTTQTVNNQGALPGMV
WQNRDVYLQGPIWAKIPHTDGDFHPSPLMGGFGLKHPPPQILIKNTPVPA
NPPETFTPAKFASFITQYSTGQVSVEIEWELQKENSKRWNPEIQYTSNYD
KQTGVDFAVDTQGVYSEPRPIGTRYLTRNL

[0215] The VP1 sequence of an AAV capsid isolated from cynomolgus macaque (denoted as Bcy.20) is set out as SEQ ID NO:48 (amino acids 1-730) and the locations of the associated variable regions and GBS and GH loop regions are defined in Table 5 below. The VP2 capsid protein spans amino acids 138-730 of SEQ ID NO:48 and the VP3 capsid protein spans amino acids 199-730 of SEQ ID NO:48.

(SEQ ID NO: 48)
MAADGYLPDWLEDNLSEGIREWWALKPGAPQPKANQQKQDDGRGLVLPGY
KYLGPFNGLDKGEPVNEADAAALEHDKAYDQQLKAGDNPYLRYNHADAEF
QERLQEDTSFGGNLGRAVFQAKKRVLEPLGLVEEAAKTAPGKKRPVDSPD
STSGIGKKGQQPARKRLNFGQTGDAESVPDPQPIGEPPAAPSGLGSGTMA
AGGGAPMADNNEGADGVGNASGNWHCDSTWLGNRVITTSTRTWALPTYNN
HLYKQISSGSSGATNDNHYEGYSTPWGYFDENREHCHFSPRDWQRLINNN
WGFRPKRLRFKLFNIQVKEVTTNDGVTTIANNLTSTVQVFSDSEYQLPYV
LGSAHQGCLPPFPADVFMIPQYGYLTLNNGSQSVGRSSFYCLEYFPSQVL
RTGNNFEFSYEFEDVPFHSSYAHSQSLDRLMNPLIDQYLYYLARTQSSTG
TSTRELQFHQAGPATMAEQSKNWLPGPCFRQQRISKTSDNNNNSNFAWTG
ATKYHLNGRNSLTNPGVPMATHKDDESVFFPINGVLVFGKTGASNKTTLE
NVLMTDEEEIKATNPVATEEYGVVSSNIQSQNSNPTTQTVNNQGALPGMV
WQNRDVYLQGPIWAKIPHTDGNFHPSPLMGGFGLKHPPPQILIKNTPVPA
NPPETFTPAKFASFITQYSTGQVSVEIEWELQKENSKRWNPEIQYTSNYD
KQTGVDFAVDTQGVYSEPRPIGTRYLTRNL

[0216] The VP1 sequence of an AAV capsid isolated from cynomolgus macaque (denoted as Bcy.22) is set out as SEQ ID NO:49 (amino acids 1-730) and the locations of the associated variable regions and GBS and GH loop regions are defined in Table 5 below. The VP2 capsid protein spans amino acids 138-730 of SEQ ID NO:49 and the VP3 capsid protein spans amino acids 199-730 of SEQ ID NO:49.

(SEQ ID NO: 49)
MAADGYLPDWLEDNLSEGIREWWALKPGAPQPKANQQKQDDGRGLVLPGY
RYLGPFNGLDKGEPVNEADAAALEHDKAYDQQLKAGDNPYLRYNHADAEF
QERLQEDTSFGGNLGRAVFQAKKRILEPLGLVEEAAKTAPGKERPVDSPD
STSGIGKKGQQPARKRLNFGQTGDAESVPDPQPIGEPPAAPSGLGSGTMA
AGGGAPMADNNEGADGVGNASGNWHCDSTWLGNRVITTSTRTWALPTYDN
HLYKQISSSSSGATNDNHYEGYSTPWGYFDENREHCHFSPRDWQRLINNN
WGFRPKRLRFKLFNIQVKEVTTNDGVTTIANNLTSTVQVFSDSEYQLPYV
LGSAHQGCLPPFPADVFMIPQYGYLTLNNGSQSVGRSSFYCLEYFPSQML
RTGNNFEFSYEFEDVPFHSSYAHSQSLDRLMNPLIDQYLYYLARTQSSTG
TSTRELQFHQAGPATMAEQSKNWLPGPCFRQQRISKTTDNNNNSNFAWTG
ATKYHLNGRNSLTNPGVPMATHKDDESVFFPINGVLVLGKTGASNKTTLE
NVLMTDEEEIKATNPVATEEYGVVSSNIQSQNSNPTTQTVNNQGALPGMV
WQNRDVYLQGPIWAKIPHTDGNFHPSPLMGGFGLKHPPPQILIKNTPVPA
NPPETFTPAKFASFITQYSTGQVSVEIEWELQKENSKRWNPEIQYTSNYD
KQTGVDFAVDTQGVYSEPRPIGTRYLTRNL

[0217] The VP1 sequence of an AAV capsid isolated from cynomolgus macaque (denoted as Bcy.23) is set out as SEQ ID NO:50 (amino acids 1-730) and the locations of the associated variable regions and GBS and GH loop regions are defined in Table 5 below. The VP2 capsid protein spans amino acids 138-730 of SEQ ID NO:50 and the VP3 capsid protein spans amino acids 199-730 of SEQ ID NO:50.

(SEQ ID NO: 50)
MAADGYLPDWLEDNLSEGIREWWALKPGAPRPKANQQKQDDGRGLVLPGY
KYLGPFNGLDKGEPVNEADAAALEHDKAYDQQLKAGDNPYLRYNHADAEF
QERLQEDTSFGGNLGRAVFQAKKRVLEPLGLVEEAAKTAPGKKRPVDSPD
STSGIGKKGQQPARKRLNFGQTGDAESVPDPQPIGEPPAAPSGLGSGTMA
AGGGAPMADNNEGADGVGNASGNWHCDSTWLGNRVITTSTRTWALPTYNN
HLYKQISSSSSGATNDNHYEGYSTPWGYFDENREHCHFSPRDWQRLINNN
WGFRPKRLRFKLFNIQVKEVTTNDGVTTIANNLTSTVQVFSDSEYQLPYV
LGSAHQGCLPPFPADVFMIPQYGYLTLNNGSQSVGRSSFYRLEYFPSQML
RTGNNFEFSYEFEDVPFHSSYAHSQSLDRLMNPLIDQYLYYLARTQSSTG
TSTRELQFHQAGPATMAEQSKNWLPGPCFRQQRISKTTDNNNNSNFAWTG
ATKYHLNGRNSLTNPGVPMATHRDDESVFFPINGVLVFGKTGASNKTTLE
NVLMTDEEEIKATNPVATEEYGVVSSNIQSQNSNPTTQTVNNQGALPGMV
WQNRDVYLQGPIWAKIPHTDGNFHPSPLMGGFGLKHPPPQILIKNTPVPA
NPPETFTPAKFASFITQYSTGQVSVEIEWELQKENSKRWNPEIQYTSNYD
KQTGVDFAVDTQGVYSEPRPIGTRYLTRNL

[0218] The VP1 sequence of an AAV capsid isolated from marmoset (denoted as Bma.42) is set out as SEQ ID NO:51 (amino acids 1-736) and the locations of the associated variable regions and GBS and GH loop regions are defined in Table 5 below. The VP2 capsid protein spans amino acids 138-736 of SEQ ID NO:51 and the VP3 capsid protein spans amino acids 203-736 of SEQ ID NO:51.

(SEQ ID NO: 51)
MAADGYLPDWLEDNLSEGIREWWDLKPGAPKPKANQQKQDDGRGLVLPGY
KYLGPFNGLDKGEPVNAADAAALEHDKAYDQQLKAGDNPYLRYNHADAEF
QERLQEDTSFGGNLGRAVFQAKKRVLEPLGLVEEGAKTAPGKKRPVEQSP
QEPDSSSGIGKTGQQPAKKRLNFGQTGDTESVPDPQPLREPPAAPSGLGP
NTMASGGGAPMADNNEGADGVGNSSGNWHCDSTWLGDRVITTSTRTWALP
TYNNHLYKQISNGTSGGSTNDNTYEGYSTPWGYFDENREHCHFSPRDWQR
LINNNWGFRPKRLNEKPFNIQVKEVTTNEGTKTIANNPTSTVQVFTDSEY
QLPYVLGSARQGCLPPFPADVFMVPQYGYLTLNNGSQALGRSSFYCLEYF
PSQMLRTGDNFQFSYTFEDVPFHSSYAHSQSLDRLMNPLIDQYLYYLVRT
QTTGTGGTQTLAFSQAGPSSMANQARNWVPGPCYRQQRVSTTTNQNNNSN
FAWTGAAKFKLNGRDSLMNPGVAMASHKDDEDRFFPSSGVLIFGKQGAGN
DGVDYSQVLITDEEEIKATNPVATEEYGAVAINNQAANTLAQTGLVHNQG
VIPGMVWQNRDVYLQGPIWAKIPHTDGNFHPSPLMGGFGLKHPPPQILIK
NTPVPADPPLTFNQAKLNSFITQYSTGQVSVEIEWELQKENSKRWNPEIQ
YTSNYYKSTNVDFAVNTEGVYSEPRPIGTRYLTRNL

[0219] The VP1 sequence of an AAV capsid isolated from marmoset (denoted as Bma.43) is set out as SEQ ID NO:52 (amino acids 1-736) and the locations of the associated variable regions and GBS and GH loop regions are defined in Table 5 below. The VP2 capsid protein spans amino acids 138-736 of SEQ ID NO:52 and the VP3 capsid protein spans amino acids 203-736 of SEQ ID NO:52.

(SEQ ID NO: 52)
MAADGYLPDWLEDNLSEGIREWWDLKPGAPKPKANQQKQDDGRGLVLPGY
KYLGPFNGLDKGEPVNAADAAALEHDKAYDQQLKAGDNPYLRYNHADAEF
QERLQEDTSFGGNLGRAVFQAKKRVLEPLGLVEEGANTAPGKKRPVEQSP
QEPDSSSGIGKTGQQPAKKRLNFGQTGDSESVPDPQPLREPPAAPSGLGP
NTMASGGGAPMADNNEGADGVGNSSGNWHCDSTWLGDRVITTSTRTWALP
TYNNHLYKQISNGTSGGSTNDNTYEGYSTPWGYFDENREHCHFSPRDWQR
LINSNWGFRPKRLNFKLFNIQVKEVTTNEGTKTIANNLTSTVQVFTDSEY
QLPYVLGSAHQGCLPPFPADVFMVPQYGYLTLNNGSQALGRSSFYCLEYF
PSQMLRTGNNFQFSYTFEDVPFHSSYAHSQSLDRLMNPLIDQYLYYLVRT
QTTGTGGTQTLAFSQAGPSSMANQARNWVPGPCYRQQRVSTTTNQNNNSN
FAWTGAAKFKLNGRDSLMNPGVAMASHKDDEDRFFPSSGVLIFGKQGAGN
DGVDYSQVLITDEEEIKATNPVATEEYGAVAINNQAANTQAQTGLVHNQG
VIPGMVWQNRDVYLQGPIWAKIPHTDGNFHPSPLMGGFGLKHPPPQILIK
NTPVPADPPLTFNQAKLNSFITQYSTGQVSVEIEWELQKENSKRWNPEIQ
YTSNYYKSTNVDFAVNTEGVYSEPRPIGTRYLTRNL

[0220] The VP1 sequence of an AAV capsid isolated from pig (denoted as Bpo.1) is set out as SEQ ID NO:53 (amino acids 1-716) and the locations of the associated variable regions and GBS and GH loop regions are defined in Table 5 below. The VP2 capsid protein spans amino acids 137-716 of SEQ ID NO:53 and the VP3 capsid protein spans amino acids 184-716 of SEQ ID NO:53.

(SEQ ID NO: 53)
MSFVDHPPDWLEEIGEGLKEFLGLEPGPPKPKPNQQKQDNARGLVLPGYN
YLGPGNGLDRGEPVNRADEVAREHDISYNEQLQAGDNPYLKYNHADAEFQ
EKLADDTSFGGNLGKAVFQAKKRVLEPFGLVEEPAKTAAKGERIDDHYPK
KKKARVEETEAGTSGGQQLQIPAQPASSLGADTMSAGGGSPLGDNNQGAD
GVGNASGDWHCDSTWMGDRVITKSTRTWVLPSYNNHLYKEIHSGSVDGSN
ANAYEGYSTPWGYFDENREHSHWSPRDWQRLVNNYWGFRPRSLKVKIFNI
QVKEVTVQDATTTIANNLTSTVQVFTDDDYQLPYVIGNGTEGCLPAFPPQ
VFTLPQYGYATLNRNNTDDPTERSSFECLEYEPSKMLRTGNSFEFTYSFE
EVPFHCSFAPSQNLFKLANPLVDQYLYRFVSTDTSGNIQFQKNLKARYAN
TYKNWFPGPMCRTQGWYTGSGTYNRSGVTNFATSNRMDLEGASYQVNPQP
NGMTNTLQDSNKYALENTMIFNSQNAEPGTTSLYQENNLLITSESETQPV
NRVAYDTGGQMATNAQSTNLAPTVGTYNHQEMLPGSVWMDRDVYLQGPIW
AKIPETGAHFHPSPAMGGFGLKHPPPMMLIKNTPVPSNVTAFSEIPVKSF
ITQYSTGQVTVEMEWELKKEDSKRWNPEIQYTNNYNNPEFVDFAPDTSGE
YRTTRAIGTRYLTRPL

[0221] The VP1 sequence of an AAV capsid isolated from pig (denoted as Bpo.2) is set out as SEQ ID NO:54 (amino acids 1-716) and the locations of the associated variable regions and GBS and GH loop regions are defined in Table 5 below. The VP2 capsid protein spans amino acids 137-716 of SEQ ID NO:54 and the VP3 capsid protein spans amino acids 184-716 of SEQ ID NO:54.

(SEQ ID NO: 54)
MSFVDHPPDWLEEIGEGLKEFLGLEPGPPKPKPNQQKQDNARGLVLPGYN
YLGPGNGLDRGEPVNRADEVAREHDISYNEQLQAGDNPYLKYNHADAEFQ
EKLADDTSFGGNLGKAVFQAKKRALEPFGLVEEPAKTAAKGERIDDHYPK
KKKARVEETEAGTSGGQQLQIPAQPASSLGADTMSAGGGSPLGDNNQGAD
GVGNASGDWHCDSTWMGDRVITKSTRTWVLPSYNNHLYKEIHSGSVDGSN
ANAYEGYSTPWGYFDENREHSHWSPRDWQRLVNNYWGFRPRSLKVKIFNI
QVKEVTVQDATTTIANNLTSTVQVFTDDDYQLPYVIGNGTEGCLPAFPPQ
VFTLPQYGYATLNRNNTDDPTERSSFECLEYEPSKMLRTGNSFEFTYSFE
EVPFHCSFAPSQNLFKLANPLVDQYLYREVGTDTSGNIQFQKNLKARYAN
TYKNWFPGPMCRTQGWYTGSGTYNRSGVTNFATSNRMDLEGASYQVNPQP
NGMTNTLQDSNKYALENTMIFNSQNAEPGTTSLYQENNLLITSESETQPV
NRVAYDTGGQMATNAQSTNLAPTVGTYNHQEMLPGSVWMDRDVYLQGPIW
AKIPETGAHFHPSPAMGGFGLKHPPPMMLIKNTPVPSNVTAFSEIPVKSF
ITQYSTGQVTVEMEWELKKENSKRWNPEIQYTNNYNNPEFVDFAPDTSGE
YRTTRAIGTRYLTRPL

[0222] The VP1 sequence of an AAV capsid isolated from pig (denoted as Bpo.3) is set out as SEQ ID NO:55 (amino acids 1-716) and the locations of the associated variable regions and GBS and GH loop regions are defined in Table 5 below. The VP2 capsid protein spans amino acids 137-716 of SEQ ID NO:55 and the VP3 capsid protein spans amino acids 184-716 of SEQ ID NO:55.

(SEQ ID NO: 55)
MSFVDHPPDWFEEIGEGLKEFLGLEPGPPKPKPNQQKQDNARGLVLPGYN
YLGPGNGLDRGEPANRADEVAREHDISYNEQLQAGDNPYLKYNHADAEFQ
EKLADDTSFGGNLGKAVFQAKKRVLEPFGLVEEPAKTAAKGERIDDHYPK
KKKARVEETEAGTSGGQQLQIPAQPASSLGADTMSAGGGSPLGDNNQGAD
GVGNASGDWHCDSTWMGDRVITKSTRTWVLPSYNNHLYKEIHSGSVDGSN
ANAYEGYSTPWGYFDENREHSHWSPRDWQRLVNNYWGFRPRSLKVKIFNI
QVKEVTVQDATTTIANNLTSTVQVFTDDDYQLPYVIGNGTEGCLPAFPPQ
VFTLPQYGYATLNRNNTDDPTERSSFECLEYEPSKMLRTGNSFEFTYSFG
EVPLHCSFAPSQNLFKLANPLVDQHLYRFVSTDTSGNIQFQKNLKARYAN
TYKNWFPGPMCRTQGWYTGSGTYNRPGVTNFATSNRMDLEGASYQVNPQP
NGMTNTLQDSNKYALENTMIFNSQNAEPGTTSLYQENNLLITSESETQPV
NRVAYDTGGQMATNAQSTNLAPTVGTYNHQEMLPGSVWMDRDVYLQGPIW
AKIPETGAHFHPSPAMGGFGLKHPPPMMLTKNTPVPSNVTAFSEIPVKSF
ITQYSTGQVTVEMEWELKKENSKRWNPEIQYTNNYNNPEFVDFAPDTSGE
YRTTRAIGTRYLTRPL

[0223] The VP1 sequence of an AAV capsid isolated from pig (denoted as Bpo.4) is set out as SEQ ID NO:56 (amino acids 1-716) and the locations of the associated variable regions and GBS and GH loop regions are defined in Table 5 below. The VP2 capsid protein spans amino acids 137-716 of SEQ ID NO:56 and the VP3 capsid protein spans amino acids 184-716 of SEQ ID NO:56.

(SEQ ID NO: 56)
MSFVDHPPDWLEEIGEGLKEFLGLEPGPPKPKPNQQKQDNARGLVLPGYN
YLGPGNGLDRGEPVNRADEVAREHDISYNEQLQAGDNPYLKYNHADAEFQ
EKLADDTSFGGNLGKAVFQAKKRVLEPFGLVEEPAKTAAKGERIDDHYPK
KKKARVEETEAGTSGGQQLQIPAQPASSLGADTMSAGGGSPLGDNNQGAD
GVGNASGDWHCDSTWMGDRVITKSTRTWVLPSYNNHLYKEIHSGSVDGSN
ANAYEGYSTPWGYFDENREHSHWSPRDWQRLVNNYWGFRPRSLKVKIFNI
QVKEVTVQDATTTIANNLTSTVQVFTDDDYQLPYVIGNGTEGCLPAFPPQ
VFTLPQYGYATLNRNNTDDPTERSSFECLEYEPSKMLRTGNSFEFTYSFE
EVPFHCSFAPSQNLFKLANPLVDQYLYRFVSTDTSGNIQFQKNLKARYAN
TYKNWFPGPMCRTQGWYTGSGTYNRSGVTNFATSNRMDLEGASYQVNPQP
NGMTNTLQDSNKYALENTMIFNSQNAEPGTTSLYQENNLLITSESETQPV
NRVAYDTGGQMATNAQSTNLAPTVGTYNHQEMLPGSVWMDRDVYLQGPIW
AKIPETGAHFHPSPAMGGFGLKHPPPMMLIKNTPVPSNVTAFSEIPVKSF
ITQYSTGQVTVEMEWELKKENSKRWNPEIQYTNNYNNPEFVDFAPDTSGE
YRTTRAIGTRYLTRPL

[0224] The VP1 sequence of an AAV capsid isolated from pig (denoted as Bpo.6) is set out as SEQ ID NO:57 (amino acids 1-716) and the locations of the associated variable regions and GBS and GH loop regions are defined in Table 5 below. The VP2 capsid protein spans amino acids 137-716 of SEQ ID NO:57 and the VP3 capsid protein spans amino acids 184-716 of SEQ ID NO:57.

(SEQ ID NO: 57)
MSFVDHPPDWLEEIGEGLKEFLGLEPGPPKPKPNQQKQDNARGLVLPGYN
YLGPGNGLDRGEPVNRADEVAREHGISYNEQLQAGDDPYLKYNHADAEFQ
EKLADDTSFGGNLGKAVFQAKKRVLEPFGLVEEPAKTAAKGERIDDHYPK
KKKARVEETEAGTGGGQQLQIPAQPASSLGADTMSAGGGSPLGDNNQGAD
GVGNASGDWHCDSTWMGDRVITKSTRTWVLPSYNNHLYKEIHSGSVDGSN
ANAYEGYSTPWGYFDENREHSHWSPRDWQRLVNNYWGFRPRSLKVKIFNI
QVKEVTVQDATTTIANNLTSTVQVFTDDDYQLPYVIGNGTEGCLPAFPPQ
VFTLPQYGYATLNRNNTDDPTERSSFECLEYEPSKMLRTGNSLEFTYSFE
EVPFHCSFAPSQNLFKLANPLVDQYLYRFVSTDTSGNIQFQKNLKARYAN
TYKNWFPGPMCRTQGWYTGSGTYNRSGVTNFATSNRMDLEGASYQVNPQP
NGMTNTLQDSNKYALENTMIFNSQNAEPGTTSLYQENNLLITSESETQPV
NRVAYDTGGQMATNAQSTNLAPTVGTYNHQEMLPGSVWMDRDVYLQGPIW
AKIPETGAHFHPSPAMGGFGLKHPPPMMLIKNTPVPSNVTAFSEIPVKSF
ITQYSTGQVTVEMEWELKKENSKRWNPEIQYTNNYNNPEFVDFAPDTSGE
YRTTRAIGTRYLTRPL

[0225] The VP1 sequence of an AAV capsid isolated from pig (denoted as Bpo.8) is set out as SEQ ID NO:58 (amino acids 1-716) and the locations of the associated variable regions and GBS and GH loop regions are defined in Table 5 below. The VP2 capsid protein spans amino acids 137-716 of SEQ ID NO:58 and the VP3 capsid protein spans amino acids 184-716 of SEQ ID NO:58.

(SEQ ID NO: 58)
MSFVDHPPDWLEEIGEGLKEFLGLKPGPPKPKPNQQKQDNARGLVLPGYN
YLGPGNGLGRGEPVNRADEVAREHDISYNEQLQAGDNPYLKYNHADAEFQ
EKLADDTSFGGNLGKAVFQAKKRVLEPFGLVEEPAKTAAKGERIDDHYPK
KKKARVEETEAGTSGGQQLQIPAQPASSLGADTMSAGGGSPLGDNNQGAD
GVGNASGDWHCDSTWMGDRVITKSTRTWVLPSYNNHLYKEIHSGSVDGSN
ANAYEGYSTPWGYFDENREHSHWSPRDWQRLVNNYWGFRPRSLKVKIFNI
QVKEVTVQDATTTIANNLTSTVQVFTDDDYQLPYVIGNGTEGCLPAFPPQ
VFTLPQYGYATLNRNNTDDPTERSSFECLEYEPSKMLRTGNSFEFTYSFE
EVPFHCSFAPSQNLFKLANPLVDQYLYRFVSTDTSGNIQFQKNLKARYAN
TYKNWFPGPMCRTQGWYTGSGTYNRSGVTNFATSNRMDLEGASYQANPQP
NGMTNTLQDSNKYALENTMIFNSQNAEPGTTSLYQENNLLITSESETQPV
NRVAYDTGGQMATNAQSTNLAPTVGTYNHQEMLPGSVWMDRDVYLQGPIW
AKIPETGAHFHPSPAMGGFGLKHPPPMMLIKNTPVPSNVTAFSEIPVKSL
ITQYSTGQVTVEMEWELKKENSKRWNPEIQYTNNYNNPEFVDFAPDTSGE
YRTTRAIGTRYLTRPL

[0226] The VP1 sequence of an AAV capsid isolated from pig (denoted as Bpo.13) is set out as SEQ ID NO:59 (amino acids 1-716) and the locations of the associated variable regions and GBS and GH loop regions are defined in Table 5 below. The VP2 capsid protein spans amino acids 137-716 of SEQ ID NO:59 and the VP3 capsid protein spans amino acids 184-716 of SEQ ID NO:59.

(SEQ ID NO: 59)
MSFVDHPPDWLEEIGEGLKEFLGLEPGPPKPKPNQQKQDNARGLVLPGYN
YLGPGNGLDRGEPVNRADEVAREHDISYNEQLQAGDNPYLKYNHADAEFQ
EKLADDTSFGGNLGKAVFQAKKRVLEPFGLVEEPAKTAAKGERIDDHYPK
KKKARVEETEAGTSGGQQLQIPAQPASSLGADTMSAGGGSPLGDNNQGAD
GVGNASGDWHCDSTWMGDRVITKSTRTWVLPSYNNHLYKEIHSGSVDGSN
ANAYEGYSTPWGYFDENREHSHWSPRDWQRLVNNYWGFRPRSLKVKIFNI
QVKEVTVQDATTTIANNLASTVQVFTDDDYQLPYVIGNGTEGCLPAFPPQ
VFTLPQYGYATLNRNNTDDPTERSSFECLEYEPSKMLRTGNSFEFTYSFE
EVPFHCSFAPSQNLFKLANPLVDQYLYRFVSTDTSGNIQFQKNLKARYAN
TYKNWFPGPMCRTQGWYTGSGTYNRSGVTNFATSNRMDLEGASYQVNPQP
NGMTNTLQDSNKYALENTMIFNSQNAEPGTTSLYQENNLLITSESETQPV
NRVAYDTGGQMATNAQSTNLAPTVGTYNHQEMLPGSVWMDRDVYLQGPIW
AKIPETGAHFHPSPAMGGFGLKHPPPMMLIKNTPVPSNVTAFSEIPVKSF
ITQYSTGQVTVEMEWELKKENSKRWNPEIQYTNNYNNPEFVDAPDTSGEY
RTTRAIGTRYLTRPL

[0227] The VP1 sequence of an AAV capsid isolated from pig (denoted as Bpo.18) is set out as SEQ ID NO:60 (amino acids 1-716) and the locations of the associated variable regions and GBS and GH loop regions are defined in Table 5 below. The VP2 capsid protein spans amino acids 137-716 of SEQ ID NO:60 and the VP3 capsid protein spans amino acids 184-716 of SEQ ID NO:60.

(SEQ ID NO: 60)
MSFVDHPPDWLEEIGEGLKEFLGLEPGPPKPKPNQQKQDNARGLVLPGYN
YLGPGNGLDRGEPVNRADEVAREHDISYNEQLQAGDDPYLKYNHADAEFQ
EKLADDTSFGGNLGKAVFQAKKRVLEPFGLVEEPAKTAAKGERIDDHYPK
KKKARVEETEAGTSGGQQLQIPAQPASSLGADTMSAGGGSPLGDNNQGAD
GVGNASGDWHCDSTWMGDRVITKSTRTWVLPSYNNHLYKEIHSGSVDGSN
ANAYEGYSTPWGYFDENREHSHWSPRDWQRLVNNYWGFRPRSLKVKIFNI
QVKEVTVQDATTTIANNLTSTVQVFTDDDYQLPYVIGNGTEGCLPAFPPQ
VFTLPQYGYATLNRNNTDDPTERSSFECLEYEPSKMLRTGNSFEFTYSFE
EVPFHCSFAPSQNLFKLANPLVDQYLYRFVSTDTSGNIQFQKNLKARYAN
TYKNWFPGPMRRTQGWYTGSGTYNRSGVTNFATSNRMDLEGASYQVNPQP
NGMTNTLQDSNKYALENTMIFNSQNAEPGTTSLYQENNLLITSESETQPV
NRVAYDTGGQMATNAQSTNLAPTVGTYNHQEMLPGSVWMDRDVYLQGPIW
AKIPETGAHFHPSPAMGGFGLKHPPPMMLIKNTPVPSNVTAFSEIPVKSF
ITQYSTGQVTVEMEWELKKENSKRWNPEIQYTNNYNNPEFVDFAPDTSGE
YRTTRAIGTRYLTRPL

[0228] The VP1 sequence of an AAV capsid isolated from pig (denoted as Bpo.20) is set out as SEQ ID NO:61 (amino acids 1-716) and the locations of the associated variable regions and GBS and GH loop regions are defined in Table 5 below. The VP2 capsid protein spans amino acids 137-716 of SEQ ID NO:61 and the VP3 capsid protein spans amino acids 184-716 of SEQ ID NO:61.

(SEQ ID NO: 61)
MSFVDHPPDWLEEIGEGLKEFLGLEPGPPKPKPNQQKQDNARGLVLPGYN
YLGPGNGLDRGEPVNRADEVAREHDISYNEQLQAGDNPYLKYNHADAEFQ
EKLADDTSFGGNLGKAVFQAKKRVLEPFGLVEEPAKTAAKGERIDDHYPK
KKKARVEETEAGTSGGQQLQIPAQPASSLGADTMSAGGGSPLGDNNQGAD
GVGNASGDWHCDSTWMGDRVITKSTRTWVLPSYNNHLYKEIHSGSVDGSN
ANAYEGYSTPWGYFDENREHSHWGPRDWQRLVNNYWGFRPRSLKVKIFNI
QVKEVTVQDATTTIANNLTSTVQVFTDDDYQLPYVIGNGTEGCLPAFPPQ
VFTLPQYGYATLNRNNTDDPTERSSFECLEYEPSKMLRTGNSFEFTYSFE
GVPFHCSFAPSQNLFKLANPLVDQYLYREVSTDTSGNIQFQKNLKARYAN
TYKNWFPGPMCRTQGWYTGSGTYNRSGVTNFATSNRMDLEGASYQVNPQP
NGMTNTLQDSNKYALENTMIFNSQNAEPGTTSLYQENNLLITSESETQPV
NRVAYDTGGQMATNAQSTNLAPTVGTYNHQEMLPGSVWMDRDVYLQGPIW
AKIPETGAHFHPSPAMGGFGLKHPPPMMLIKNTPVPSNVTAFSEIPVKSF
ITQYSTGQVTVEMEWELKKENSKRWNPEIQYTNNYNNPEFVDFAPDTSGE
YRTTRAIGTRYLTRPL

[0229] The VP1 sequence of an AAV capsid isolated from pig (denoted as Bpo.23) is set out as SEQ ID NO:62 (amino acids 1-716) and the locations of the associated variable regions and GBS and GH loop regions are defined in Table 5 below. The VP2 capsid protein spans amino acids 137-716 of SEQ ID NO:62 and the VP3 capsid protein spans amino acids 184-716 of SEQ ID NO:62.

(SEQ ID NO: 62)
MSFVDHPPDWLEEIGEGLKEFLGLEPGPPKPKPNQQKRDNARGLVLPGY
NYLGPGNGLDRGEPVNRVDEVARERDISYNEQLQAGDNPYLKYNHADAE
FQEKLADDTSFGGNLGKAVFQAKKRVLEPFGLVEEPAKTAAKGERIDDH
YPKKKKARVEETEAGTSGGQQLQIPAQPASSLGADTMSAGGGSPLGDNN
QGADGVGNASGDWHCDSTWMGDRVITKSTRTWVLPSYNNHLYKEIHSGS
VDGSNANAYEGYSTPWGYFDFNRFHSHWSPRDWQRLVNNYWGFRPRSLK
VKIFNIQVKEVTVQDATTTIANNLTSTVQVFTDDDYQLPYVIGNGTEGC
LPAFPLQVFTLPQYGYATLNRNNTDDPTERSSFFCLEYFPSKMLRTGNS
FEFTYSFEEVPFHCSFAPSQNLFKLANPLVDQYLYRFVSTDTSGNIQFQ
KNLKARYANTYKNWFPGPMCRTQGWYTGSGTYNRSGVTNFATSNRMDLE
GASYQVNPQPNGMTNTLQDSNKYALENTMIFNSQNAEPGTTSLYQENNL
LITSESETQPVNRVAYDTGGQMATNAQSTNLAPTVGTYNHQEMLPGSVW
MDRDVYLQGPIWAKIPETGAHFHPSPAMGGFGLKHPPPMMLIKNTPVPS
NVTAFSEIPVKSFITQYSTGQVTVEMEWELKKENSKRWNPEIQYTNNYN
NPEFVDFAPDTSGEYRTTRAIGTRYLTRPL

[0230] The VP1 sequence of an AAV capsid isolated from pig (denoted as Bpo.24) is set out as SEQ ID NO:63 (amino acids 1-716) and the locations of the associated variable regions and GBS and GH loop regions are defined in Table 5 below. The VP2 capsid protein spans amino acids 137-716 of SEQ ID NO:63 and the VP3 capsid protein spans amino acids 184-716 of SEQ ID NO:63.

(SEQ ID NO: 63)
MSFVDHPPDWLEEIGEGLKEFLGLEPGPPKPKPNQQKQDNARGLVLPGY
NYLGPGNGLDRGEPVNRADEVAREHDISYNEQLQAGDNPYLKYNHADAE
FQEKLADDTSFGGNLGKAVFQAKKRVLEPFGLVEEPAKTAAKGERIDDH
YPKKKKARVEETEAGTSGGQQLQIPAQPASSLGADTMSAGGGSPLGDNN
QGADGVGNASGDWHCDSTWMGDRVITKSTRTWVLPSYNNHLYKEIHSGS
VDGSNANAYFGYSTPWGYFDFNRFHSHWSPRDWQRLVNNYWGFRPRSLK
VKIFNIQVKEVTVQDATTTIANNLTSTVQVFTDDDYQLPYVIGNGTEGC
LPAFPPQVFTLPQYGYATLNRNNTDDPTERSSFFCLEYFPSKMLRTGNS
FEFTYSFEEVPFHCSFAPSQNLFKLANPLVDQYLYRFVSTDTSGNIQFQ
KNLKARYANTYKNWFPGPMCRTQGWYTGSGTYNRSGVTNFATSNRMDLE
GASYQVNPQPNGMTNTLQDSNKYALENTMIFNSQNAEPGTTSLYQENNL
LITSESETQPVNRVAYDTGGQMATNAQSTNLAPTVGTYNHQEMLPGSVW
MDRDVYLQGPIWAKIPETGAHFHPSPAMGGFGLKHPPPMMLIKNTPVPS
NVTAFSEIPVKSFITQYSTGQVTVEMEWELKKENSKRWNPEIQYTNNYN
NPEFVDFAPDTSGECRTTRAIGTRYLTRPL

[0231] The VP1 sequence of an AAV capsid isolated from pig (denoted as Bpo.27) is set out as SEQ ID NO:64 (amino acids 1-716) and the locations of the associated variable regions and GBS and GH loop regions are defined in Table 5 below. The VP2 capsid protein spans amino acids 137-716 of SEQ ID NO:64 and the VP3 capsid protein spans amino acids 184-716 of SEQ ID NO:64.

(SEQ ID NO: 64)
MSFVDHPPDWLEEIGEGLKEFLGLEPGPPKPKPNQQKQDNARGLVLPGY
NYLGPGNGLDRGEPVNRADEVAREHDISYNEQLQAGDNPYLKYNHADAE
FQEKLADDTSFGGNLGKAVFQAKKRVLEPFGLVEEPAKTAAKGERIDDH
YPKKKKARVEETEAGTSGGQQLQIPAQPASSLGADTMSAGGGSPLGDNN
QGADGVGNASGDWHCDSTWMGDRVITKSTRTWVLPSYNNHLYKEIHSGS
VDGSNANAYFGYSTPWGYFDFNRFHSHWSPRDWQRLVDNYWGFRPRSLK
VKIFNIQVKEVTVQDATTTIANNLTSTVQVFTDDDYQLPYVIGNGTEGC
LPAFPPQVFTLPQYGYATLNRNNTDDPTERSSFFCLEYFPSKMLRTGNS
FEFTYSFEEVPFHCSFAPSQNLFKLANPLVDQYLYRFVSTDTSGNIQFQ
KNLKARYANTYKNWFPGPMCRTQGWYTGSGTYNRSGVTNFATSNRMDLE
GASYQVNPQPNGMTNTLQDSNKYALENTMVFNSQNAEPGTTSLYQENNL
LITSESETQPVNRVAYNTGGQMATNAQSTNLAPTVGTYNHQEMLPGSVW
MDRDVYLQGPIWAKIPETGAHFHPSPAMGGFGLKHPPPMMLIKNTPVPS
NVTAFSEIPVKSFITQYSTGQVTVEMEWELKKENSKRWNPEIQYTNNYN
NPEFVDFAPDTSGEYRTTRAIGTRYLTRPL

[0232] The VP1 sequence of an AAV capsid isolated from pig (denoted as Bpo.28) is set out as SEQ ID NO:65 (amino acids 1-716) and the locations of the associated variable regions and GBS and GH loop regions are defined in Table 5 below. The VP2 capsid protein spans amino acids 137-716 of SEQ ID NO:65 and the VP3 capsid protein spans amino acids 184-716 of SEQ ID NO:65.

(SEQ ID NO: 65)
MSFVDHPPDWLEEIGEGLKEFLGLEPGPPKPKPNQQKRDNARGLVLPGY
NYLGPGNGLGRGEPVNRADEVAREHDISYNEQLQAGDNPYLKYNHADAE
FQEKLADDTSFGGNLGKAVFQAKKRVLEPFGLVEEPAKTAAKGERIDDH
YPKKKKARVEETEAGTSGGQQLQIPAQPASSLGADTMSAGGGSPLGDNN
QGADGVGNASGDWHCDSTWMGDRVITKSTRTWVLPSYNNHLYKEIHSGS
VDGSNANAYFGYSTPWGYFDFNRFHSHWSPRDWQRLVNNYWGLRPRSLK
VKIFNIQVKEVTVQDATTTIANNLTSTVQVFTDDDYQLPYVIGNGTEGC
LPAFPPQVFTLPQYGYATLNRNNTDDPTERSSFFCLEYFPSKMLRTGNS
FEFTYSFEEVPFHCSFAPSQNLFKLANPLADQYLYRFVSTDTSGNIQFQ
KNLKARYANTYKNWFPGPMCRTQGWYTGSGTYNRSGVTNFATSNRMDLE
GASYQVNPQPNGMTNTLQDSNKYALENTMISNSQNAEPGTTSLYRENNL
LITSESETQPVNRVAYDTGGQMATNAQSTNLAPTVGTYNHQEMLPGSVW
MDRDVYLQGPIWAKIPETGAHFHPSPAMGGFGLKHPPPMMLIKNTPVPS
NVTAFSEIPVKSFITQYSTGQVTVEMEWELKKENSKRWNPEIQYTNNYN
NPEFVDFAPDTSGEYRTTRAIGTRYLTRPL

[0233] The VP1 sequence of an AAV capsid isolated from pig (denoted as Bpo.29) is set out as SEQ ID NO:66 (amino acids 1-716) and the locations of the associated variable regions and GBS and GH loop regions are defined in Table 5 below. The VP2 capsid protein spans amino acids 137-716 of SEQ ID NO:66 and the VP3 capsid protein spans amino acids 184-716 of SEQ ID NO:66.

(SEQ ID NO: 66)
MSFVDHPPDWLEEIGEGLKEFLGLEPGPPKPKPNQQKQDNARGLVLPGY
NYLGPGNGLDRGEPVNRADEVAREHDISYNEQLQAGDNPYLKYNHADAE
FQEKLADDTSFGGNLGKAVFQAKKRVLEPFGLVEEPAKTAAKGERIDDH
YPKKKKARVEETEAGTSGGQQLQIPAQPASSLGADTMSAGGGSPLGDNN
QGADGVGNASGDWHCDSTWMGDRVITKSTRTWVLPSYNNHLYKEIHSGS
VDGSNANAYFGYSTPWGYFDFNRFHSHWSPRDWQRLVNNYWGFRPRSLK
VKIFNIQVKEVTVQDATTTIANNLTSTVQVFTDDDYQLPYVIGNGTEGC
LPAFPPQVFTLPQYGYATLNRNNTDDPTERSSFFCLEYFPSKMLRTGNS
FEFTYSFEEVPFHCSFAPSQNLFKLANPLVDQYLYRFVSTDTSGNIQFQ
KNLKARYANTYKNWFPGPMCRTQGWYTGSGTYNRSGVTNFATSNRMDLE
GASYQVNPQPNGMTNTLQDSNKYALENTMIFNSQNAEPGTTSLYQENNL
LITSESGTQPVNRVAYDTGGQMATNAQSTNLAPTVGTYNHQEMLPGSVW
MDRGVYLQGPIWAKIPETGAHFHPSPAMGGFGLKHPPPMMLIKNTPVPS
NVTAFSEIPVKSFVTQYSTGQVTVEMEWELKKENSKRWNPEIQYTNNYN
NPEFVDFAPDTSGEYRTTRAIGTRYLTRPL

[0234] The VP1 sequence of an AAV capsid isolated from pig (denoted as Bpo.33) is set out as SEQ ID NO:67 (amino acids 1-716) and the locations of the associated variable regions and GBS and GH loop regions are defined in Table 5 below. The VP2 capsid protein spans amino acids 137-716 of SEQ ID NO:67 and the VP3 capsid protein spans amino acids 184-716 of SEQ ID NO:67.

(SEQ ID NO: 67)
MSFVDHPPDWLEEIGEGLKEFLGLEPGPPKPKPNQQKQDNARGLVLPGY
NYLGPGNGLDRGEPVNRADEVAREHDISYNEQLQAGDNPYLKYNHADAE
FQEKLADDTSFGGNLGKAVFQAKKRVLEPFGLVEEPAKTAAKGERIDDH
YPKKKKARVEETEAGTSGGQQLQIPAQPASSLGADTMSAGGGSPLGDNN
QGADGVGNASGDWHCDSTWMGDRVITKSTRTWVLPSYNNHLYKEIHSGS
VDGSNAHAYFGYSTPWGYFDFNRFHSHWSPRDWQRLVNNYWGFRPRSLK
VKIFNIQVKEVTVQDATTTIANNLTSTVQVFTDDDYQLPYVIGNGTEGC
LPAFPPQVFTLPQYGYATLNRNNTDDPTERSSFFCLEYFPSKMLRTGNS
FEFTYSFEEVPFHCSFAPSQNLFKLANPLVDQYLYRFVSTDTSGNIQFQ
KNLKARYANTYKNWFPGPMCRTQGWYTGSGTYNRSGVTNFATSNRMDLE
GASYQVNPQPNGMTNTLQDSNKYALENTMIFNSQNAEPGTTSLYQENNL
LITSESETQPVNRVAYDTGGQMATNAQSTNLAPTVGTYNHQEMLPGSVW
MDRDVYLQGPIWAKIPETGAHFHPSPAMGGFGLKHPPPMMLIKNTPVPS
NVTAFSEIPVKSFITQYSTGQVTVEMEWELKKENSKRWNPEIQYTNNYN
NPEFVDFAPDTSGEYRTTRAIGTRYLTRPL

[0235] The VP1 sequence of an AAV capsid isolated from pig (denoted as Bpo.35) is set out as SEQ ID NO:68 (amino acids 1-716) and the locations of the associated variable regions and GBS and GH loop regions are defined in Table 5 below. The VP2 capsid protein spans amino acids 137-716 of SEQ ID NO:68 and the VP3 capsid protein spans amino acids 184-716 of SEQ ID NO:68.

(SEQ ID NO: 68)
MSFVDHPPDWLEEIGEGLKEFLGLEPGPPKPKPNQQKRDNARGLVLPGY
NYLGPGNGLDRGEPVNRADEVAREHDISYNEQLQAGDNPYLKYNHADAE
FQEKLADDTSFGGNLGKAVFQAKKRVLEPFGLVEEPAKTAAKGERIDDH
YPKKKKARVEETEAGTSGGQQLQIPAQPASSLGADTMSAGGGSPLGDNN
QGADGVGNASGDWHCDSTWMGDRVITKSTRTWVLPSYNNHLYKEIHSGS
VDGSNANAYFGYSTPWGYFDFNRFHSHWSPRDWQRLVNNYWGFRPRSLK
VKIFNIQVKEVTVQDATTTIANNLTSTVQVFTDDDYQLPYVIGNGTEGC
LPAFPPQVFTLPQYGYATLNRNNTDDPTERSSFFCLEYFPSKMLRTGNS
FEFTYSFEEVPFHCSFAPSQNLFKLANPLVDQYLYRFVSTDTSGNIQFQ
KNLKARYANTYKNWFPGPMCRTQGWYTGSGTYNRSGVTNFATSNRMDLE
GASYQVNPQPNGMTNTLQDSNKYALENTMIFNSQNAEPGTTSLYQENNL
LITSESETQPVNRVAYDTGGQMATNAQSTNLAPTVGTYNHQEMLPGSVW
MDRDVYLQGPIWAKIPETGAHFHPSPAMGGFGLKHPPPMMLIKNTPVPS
NVTAFSEIPVKSFITQYSTGQVTVEMEWELKKENSKRWNPEIQYTNNYN
NPEFVGFAPDTSGEYRTTRAIGTRYLTRPL

[0236] The VP1 sequence of an AAV capsid isolated from pig (denoted as Bpo.36) is set out as SEQ ID NO:69 (amino acids 1-716) and the locations of the associated variable regions and GBS and GH loop regions are defined in Table 5 below. The VP2 capsid protein spans amino acids 137-716 of SEQ ID NO:69 and the VP3 capsid protein spans amino acids 184-716 of SEQ ID NO:69.

(SEQ ID NO: 69)
MSFVDHPPDWLEEIGEGLKEFLGLEPGPPKPKPNQQKQDNARGLVLPGY
NYLGPGNGLDRGEPVNRADEVAREHDISYNEQLQAGDNPYLKYNHADAE
FQEKLADDTSFGGNLGKAVFQAKKRVLEPFGLVEEPAKTAAKGERIGDH
YPKKKKARVEETEAGTSGGQQPQIPAQPASSLGADTMSAGGGSPLGDNN
QGADGVGNASGDWHCDSTWMGDRVITKSTRTWVLPSYNNHLYKEIHSGS
VDGSNANAYFGYSTPWGYFDFNRFHSHWSPRDWQRLVNNYWGFRPRSLK
VKIFNIQVKEVTVQDATTTIANNLTSTVQVFTDDDYQLPYVIGNGTEGC
LPAFPPQVFTLPQYGYATLNRNNTDDPTERSSFFCLEYLPSKMLRTGNS
FEFTYSFEEVPFHCSFAPSQNLFKLANPLVDQYLYRFVSTDTSGNIQFQ
KNLKARYANTYKNWFPGPMCRTQGWYTGSGTYNRSGVTNFATSNRMDLE
GASYQVNPQPNGMTNTLQDSNKYALENTMIFNSQNAEPGTTSLYQENNL
LITSESETQPVNRVAYNTGGQMATNAQSTNLAPTVGTYNHQEMLPGSVW
MDRDVYLQGPIWAKIPETGAHFHPSPAMGGFGLKHPPPMMLIKNTPVPS
NVTAFSEIPVKSFITQYSTGQVTVEMEWELKKENSKRWNPEIQYTNNYN
NPEFVDFAPDTSGEYRTTRAIGTRYLTRPL

[0237] The VP1 sequence of an AAV capsid isolated from pig (denoted as Bpo.37) is set out as SEQ ID NO:70 and (amino acids 1-716) and the locations of the associated variable regions and GBS and GH loop regions are defined in Table 5 below. The VP2 capsid protein spans amino acids 137-716 of SEQ ID NO:70 and the VP3 capsid protein spans amino acids 184-716 of SEQ ID NO:70.

(SEQ ID NO: 70)
MSFVDHPPDWLEEIGEGLKEFLGLKPGPLKPKPNQQKQDNARGLVLPGY
NYLGPGNGLDRGEPVNRADEVAREHDISYNEQLQAGDNPYLKYNHADAE
FQEKLADDTSFGGNLGKAVFQAKKRVLEPFGLVEEPAKTAAKGERIDDH
YPKKKKARVEETEAGTSGGQQLQIPAQPASSLGADTMSAGGGSPLGDNN
QGADGVGNASGDWHCDSTWMGDRVITKSTRTWVLPSYNNHLYKEIHSGS
VDGSNANAYFGYSTPWGYFDFNRFHSHWSPRDWQRLVNNYWGFRPRSLK
VKIFNIQVKEVTVQDATTTIANNLTSTVQVFTDDDYQLPYVIGNGTEGC
LPAFPPQVFTLPQYGYATLNRNNTDDPTERSSFFCLEYFPSKMLRTGNS
FEFTYSFEEVPFHCSFAPSQNLFKLANPLVDQYLYRFVSTDTPGNIQFQ
KNLKARYANTYKNWFPGPMCRTQGWYTGSGTYNRSGVTNFATSNRMDLE
GASYQANPQPNGMTNTLQDSNKYALENTMIFNSQNAEPGTTSLYQENNL
LITSESETQPVNRVAYDTGGQMATNAQSTNLAPTVGTYNHQEMLPGSVW
MDRDVYLQGPIWAKIPETGAHFHPSPAMGGFGLKHPPPMMLIKNTPVPS
NVTAFSEIPVKSLITQYSTGQVTVEMEWELKKENSKRWNPEIQYTNNYN
NPEFVDFAPDTSGEYRTTRAIGTRYLTRPL

[0238] The VP1 sequence of an AAV capsid isolated from rhesus macaque (denoted as Brh.26) is set out as SEQ ID NO:71 and (amino acids 1-736) and the locations of the associated variable regions and GBS and GH loop regions are defined in Table 5 below. The VP2 capsid protein spans amino acids 138-736 of SEQ ID NO:71 and the VP3 capsid protein spans amino acids 203-736 of SEQ ID NO:71.

(SEQ ID NO: 71)
MAADGYLPDWLEDNLSEGIREWWDLKPGAPKPKANQQKQDDGRGLVLPG
YKYLGPFNGLDKGEPANAADAAALEHDKAYDQQLKAGDNPYLRYNHADA
EFQERLQEDTSFGGNLGRAIFQAKKRVLEPLGLVEEGAKTAPGKKGPVE
QSPQEPDSSSGIGKTGQQPAKKRLNFGQTGDSESVPDPQPLGEPPAAPS
GLGPNTMASGGGAPMADNNEGADGVGNSSGNWHCDSTWLGDRVITTSTR
TWALPTYNNHLYKQISNGTSGGSTNDNTYFGYSTPWGYFDFNRFHCHFS
PRDWQRLINNNWGFRPKRLNFKLFNIQVKEVTTNEGTKTIANNLTSTVQ
VFTDSEYQLPYVLGSAHQGCLPPFPADVFMVPQYGYLTLNNGSQALGRS
SFYCLEYFPSQMLRTGNNFQFSYTFEDVPFHSSYAHSQSLDRLMNPLID
QYLYYLVRTQTTGTGGTQTLAFSQAGPSSMANQARNWVPGPCYRQQRVS
TTTNQNNNSNFAWTGAAKFKLNGRDSLMNPGVAMASHKDDDDRFFPSSG
VLIFGKQGTGNDGVDYSQVLITDEEEIKATNPVATEEYGAVAINNQAAN
TQAQTGLVHNQGVIPGMVWQNRDVYLQGPIWAKIPHTDGNFHPSPLMGG
FGLKHPPPQILIKNTPVPADPPLTFNQAKLNSFITQYSTGQVSVEIEWE
LQKENSKRWNPEIQYTSNYYKSTNVDFAVNTEGVYSEPRPIGTRYLTRN
L

[0239] The VP1 sequence of an AAV capsid isolated from rhesus macaque (denoted as Brh.27) is set out as SEQ ID NO:72 and (amino acids 1-736) and the locations of the associated variable regions and GBS and GH loop regions are defined in Table 5 below. The VP2 capsid protein spans amino acids 138-736 of SEQ ID NO:72 and the VP3 capsid protein spans amino acids 203-736 of SEQ ID NO:72.

(SEQ ID NO: 72)
MAADGYLPDWLEDNLSEGIREWWDLKPGAPKPKANQQKQDDGRGLVLPG
YKYLGPFNGLDKGEPVNAADAAALEHDKAYDQQLKAGDNPYLRYNHADA
EFQERLQEDTSFGGNLGRAIFQAKKRVLEPLGLVEEGAKTAPGKKRPVE
QSPQEPDSSSGIGKTGQQPAKKRLNFGQTGDSESVPDPQPLGEPPAAPS
GLGPNTMASGGGAPMADNNEGADGVGNPSGNWHCDSTRLGDRVITTSTR
TWALPTYNNHLYKQISNGTSGGSTNDNTYEGYSTPWGYFDENREHCHFS
PRDWQRLINNNWGFRPKRLNFKLFNIQVKEVTTNEGTKTIANNLTSTVQ
VFTDSEYQLPYVLGSAHQGCLPPFPADVFMVPQYGYLTLNNGSQALGRS
SFYCLEYFPSQMLRTSNNFQFSYTFEDVPFHSSYAHSQSLDRLMNPLID
QYLYYLVRTQTTGTGGTQTLAFSQAGPSSMANQARNWVPGPCYRQQRVS
TTTNQNNNSNFAWTGAAKFKLNGRDSLMNPGVAMASHKDDDDRFFPSSG
VLIFGKQGTGNDGVDYSQVLITDEEEIKATNPVATEEYGAVAINNQAAN
TQAQTGLVHNQGVIPGMVWQNRDVYLQGPIWAKIPHTDGNFHPSPLMGG
FGLKLPPPQILIKNTPVPADPPLTFNQAKLNSFITQYSTGQVSVEIEWE
LQKENSKRWNPEIQYTSNYYKSTNVDFAVNTEGVYSEPRPIGTRYLTRN
L

[0240] The VP1 sequence of an AAV capsid isolated from rhesus macaque (denoted as Brh.28) is set out as SEQ ID NO:73 and (amino acids 1-736) and the locations of the associated variable regions and GBS and GH loop regions are defined in Table 5 below. The VP2 capsid protein spans amino acids 138-736 of SEQ ID NO:73 and the VP3 capsid protein spans amino acids 203-736 of SEQ ID NO:73.

(SEQ ID NO: 73)
MAADGYLPDWLEDNLSEGIREWWDLKPGAPKPKANQQKQDDGRGLVLPG
YKYLGPFNGLDKGEPVNAADAAALEHDKAYDQQLKAGDNPYLRYNHADA
EFQERLQEDTSFGGNLGRAIFQAKKRVLEPLGLVEEGAKTAPGKKRPVE
QSPQEPDSPSGIGKTGQQPAKKRLNFGQTGDSESVPDPQPLGEPPAAPS
GLGPNTMASGGGAPMADNNEGADGVGNSSGNWHCDSTWLGDRVITTSTR
TWALPTYNNHLYKQISNGTSGGSTNDNTYFGYSTPWGYFDFNRFHCHFS
PRDWQRLINNNWGFRPKRLNFKLFNIQVKEVTTNEGTKTIANNLTSTVQ
VFTDSEYQLPYVLGSAHQGCLPPFPADVFMVPQYGYLTLNNGSQALGRS
SFYCLEYFPSQMLRTGNNFQFSYTFEDVPFHSSYAHSQSLDRLMNPLID
QYLYYLVRTQTTGTGGTQTLAFSQAGPSSMANQARNWVPGPCYRQQRVS
TTTNQNNNSNFAWTGAAKFKLNGRDSLMNPGVAMASHKDDDDRFFPSSG
VLIFGKQGTGNDGVDYSQVLITDEEEIKATNPVATEEYGAVAINNQAAN
TQAQTGLVHNQGVIPGMVWQNRDVYLQGPIWAKIPHTDGNFHPSPLMGG
FGLKHPPPQILIKNTPVPADPPLTFNQAKLNSFITQYSTGQVSVEIEWE
LQKENSKRWNPEIQYTSNYYKSTNVDFAVNTEGVYSEPRPIGTRYLTRN
L

[0241] The VP1 sequence of an AAV capsid isolated from rhesus macaque (denoted as Brh.29) is set out as SEQ ID NO:74 and (amino acids 1-736) and the locations of the associated variable regions and GBS and GH loop regions are defined in Table 5 below. The VP2 capsid protein spans amino acids 138-736 of SEQ ID NO:74 and the VP3 capsid protein spans amino acids 203-736 of SEQ ID NO:74.

(SEQ ID NO: 74)
MAADGYLPDWLEDNLSEGIREWWDLKPGAPKPKANQQKQDDGRGLVLPG
YKYLGPFNGLDKGEPVNAADAAALEHDKAYDQQLKAGDNPYLRYNHADA
EFQERLQEDTSFGGNLGRAIFQAKRRVLEPLGLVEEGAKTAPGKKRPVE
QSPQEPDSSSGIGKTGQQPAKKRLNFGQTGDSESVPDPQPLGEPPAAPS
GLGPNTMASGGGAPMADNNEGADGVGNSSGNWHCDSTWLGDRVITTSTR
TWALPTYNNHLYKQISNGTSGGSTNDNTYFGYSTPWGYFDFNRFHCHFS
PRDWQRLINNNWGFRPKRLNFKLFNIQVKEVTTNEGTKTIANNLTSTVQ
VFTDSEYQLPYVLGSAHQGCLPPFPADVFMVPQYGYLTLNNGSQALGRS
SFYCLEYFPSQMLRTSNNFQFSYTFEDVPFHSSCAHSQSLDRLMNPLID
QYLYYLVRTQTTGTGGTQTLAFSQAGPGSMANQARNWVPGPCYRQQRVS
TTTNQNNNSNFAWTGAAKFKLNGRDSLMNPGVAMASHKDDDDRFFPSSG
VLIFGKQGTGNDGVDYSQVLITDEEEIKATNPVATEEYGAVAINNQAAN
TQAQTGLVHNQGVIPGMVWQNRDVYLQGPIWAKIPHTDGNFHPPPLMGG
FGLKHPPPQILIKNTPVPADPPLTFNQAKLNSFITQYSTGQVSVEIEWE
LQKENSKRWNPEIQYTSNYYKSTNVDFAVNTEGVYSEPRPIGTRYLTRN
L

[0242] The VP1 sequence of an AAV capsid isolated from rhesus macaque (denoted as Brh.30) is set out as SEQ ID NO:75 and (amino acids 1-736) and the locations of the associated variable regions and GBS and GH loop regions are defined in Table 5 below. The VP2 capsid protein spans amino acids 138-736 of SEQ ID NO:75 and the VP3 capsid protein spans amino acids 203-736 of SEQ ID NO:75.

(SEQ ID NO: 75)
MAADGYLPDWLEDNLSEGIREWWDLKPGAPKPKANQQKQDDGRGLVFPG
YKYLGPFNGLDKGEPVNAADAAALEHDKAYDQQLKAGDNPYLRYNHADA
EFQERLQEDTSFGGNLGRAIFQAKKRVLEPLGLVEEGAKTAPGKKRPVE
QSPQEPDSSSGIGKTGRQPAKKRLNFGQTGDSESVPDPQPLGEPPAAPS
GLGPNTMASGGGAPMADNNEGADGVGNSSGNWHCDSTWLGDRVITTSTR
TWALPTYNNHLYKQISNGTPGGSTNDNTYFGYSAPWGYFDFNRFHCHFS
PRDWQRLINNNWGFRPKRLNFKLFNIQVKEVTTNEGTKTIANNLTSTVQ
VFTDSEYQLPYVLGSAHQGCLPPFPADVFMVPQYGYLTLNNGSQALGRS
SFYCLEYFPSQMLRTGNNFQFSYTFEDVPFHSSYAHSQSLDRLMNPLID
QYLYYLVRTQTTGTGGTQTLAFSQAGPSSMANQARNWVPGPCYRQQRVS
TTTNQNNNSNFAWTGAAKFKLNGRDSLMNPGVAMASHKDDDDRFFPSSG
VLIFGKQGTGNDGVDYSQVLITDEEEIKATNPVATEEYGAVAINNQAAN
TQAQTGLVHNQGVIPGMVWQNRDVYQQGPIWAKIPHTDGNFHPSPLMGG
FGLKHPPPQILIKNTPVPADPPLTFNQAKLNSFITQYSTGQVSVEIEWE
LQKENSKRWNPEIQYTSNYYKSTNVDFAVNTEGVYSEPRPIGTRYLTRN
L

[0243] The VP1 sequence of an AAV capsid isolated from rhesus macaque (denoted as Brh.31) is set out as SEQ ID NO:76 and (amino acids 1-736) and the locations of the associated variable regions and GBS and GH loop regions are defined in Table 5 below. The VP2 capsid protein spans amino acids 138-736 of SEQ ID NO:76 and the VP3 capsid protein spans amino acids 203-736 of SEQ ID NO:76.

(SEQ ID NO: 76)
MAADGYLPDWLEDNLSEGIREWWDLKPGAPKPKANQQKQDDGRGLVLPG
YKYLGPFNGLDKGEPVNAADAAALEHDKAYDQQLKAGDNPYLRYNHADA
EFQERLQEDTSFGGNLGRAIFQAKKRVLEPLGLVEEGAKTAPGKKRPVE
QSPQEPDSSSGIGKTGQQPAKKRLNSGQTGDSESVPDPQPLGEPPAAPS
GLGPNTMASGGGAPMADNNEGADGVGNSSGNWHCDSTWLGDRVITTSTR
TWALPTYNNHLYKQISNGTSGGSTNDNTYFGYSTPWGYFDFNRFHCHFS
PRDWQRLINNNWGFRPKRLNFKLFNIQVKEVTTNEGTKTIANNLTSTVQ
VFTDSEYQLPYVLGSAYQGCLPPFPADVFMVPQYGYLTLNNGSQALGRS
SFYCLEYFPSQMLRTGNNFQSSYTFEDVPFHSSYAHSQSLDRLMNPLID
QYLYYLVRTQTTGTGGTQTLAFSQAGPSSMANQARNWVPGPCYRQQRVS
TTTNQNNNSNFAWTGAAKFKLNGRDSLMNPGVAMASHKDDDDRFFPSSG
VLIFGKQGTGNDGVDYSQVLITDEEEIKATNPVATEEYGAVAINNQAAN
TQAQTGLVHNQGVIPGMVWQNRDVYLQGPIWAKIPHTDGNFHPSPLMGG
FGLKHPPPQILIKNTPVPADPPLTFNQAKLNSFITQYSTGQVSVEIEWE
LQKENSKRWNPEIQYTSNYYKSTNVDFAVNTEGVYSEPRPIGTRYLTRN
L

[0244] The VP1 sequence of an AAV capsid isolated from rhesus macaque (denoted as Brh.32) is set out as SEQ ID NO:77 and (amino acids 1-736) and the locations of the associated variable regions and GBS and GH loop regions are defined in Table 5 below. The VP2 capsid protein spans amino acids 138-736 of SEQ ID NO:77 and the VP3 capsid protein spans amino acids 203-736 of SEQ ID NO:77.

(SEQ ID NO: 77)
MAADGYLPDWLEDNLSEGIREWWDLKPGASKPKANQQKQDDGRGLVLPGY
KYLGPFNGLDKGEPVNAADAAALEHDKAYDQQLKAGDNPYLRYNHADAEF
QERLQEDTSFGGNLGRAVFQAKKRVLEPLGLVEEGAKTVPGKKRPVEQSP
QEPDSSSGIGKTGQQPAKKRLNFGQTGDSESVPDPQPLGEPPAAPSGLGP
NTMASGGGAPMADNNEGADGVGNSSGNWHCDSTWLGDRVITTSTRTWALP
TYNNHLYKQISNGTSGGSTNDNTYEGYSTPWGYFDENREHCHFSPRDWQR
LINNNWGFRPKRLNFKLFNIQVKEVTTNEGTKTIANNLTSTVQVFTDSEY
QLPYVLGSAYQGCLPPFPADVFMVPQYGYLTLNNGSQALGRSSFYCLEYF
PSQMLRTGNNFQFSYTFEDVPFHSSYAHSQSLDRLMNPLIDQYLYYLVRT
QTTGTGGTQTLAFSQAGPSSMANQARNWVPGPCYRQQRVSTTTNQNNNSN
FAWTGAAKFKLNGRDSLMNPGVAMASHKDDDDRFFPSSGVLIFGKQGTGN
DGVDYSQVLITDEEEIKATNPVATEEYGAVAINNQAANTQAQTGLVHNQG
VIPGMVWQNRDVYLQGPIWAKIPHTDGNFHPSPLMGGFGLKHPPPQILIK
NTPVPADPPLTFNQAKLNSFITQYSTGQVSVEIEWELQKENSKRWNPEIQ
YTSNYYKSTNVDFAVNTEGVYSEPRPIGTRYLTRNL

[0245] The VP1 sequence of an AAV capsid isolated from rhesus macaque (denoted as Brh.33) is set out as SEQ ID NO:78 and (amino acids 1-736) and the locations of the associated variable regions and GBS and GH loop regions are defined in Table 5 below. The VP2 capsid protein spans amino acids 138-736 of SEQ ID NO:78 and the VP3 capsid protein spans amino acids 203-736 of SEQ ID NO:78.

(SEQ ID NO: 78)
MAADGYLPDWLEDNLSEGIREWWDLKPGASKPKANQQKQDDGRGLVLPGY
KYLGPFNGLDKGEPVNAADAAALEHDKAYDQQLKAGDNPYLRYNHADAEF
QERLQEDTSFGGNLGRAVFQAKKRVLEPLGLVEEGAKTVPGKKRPVEQSP
QEPDSSSGIGKTGQQPAKKRLNFGQTGDSESVPDPQPLGEPPAAPSGLGP
NTMASGGGAPMADNNEGADGVGNSSGNWHCDSTWLGDRVITTSTRTWALP
TYNNHLYKQISNGTSGGSTNDNTYEGYSTPWGYFDENREHCHFSPRDWQR
LINNNWGFRPKRLNFKLFNIQVKEVTTNEGTKTIANNLTSTVQVFTDSEY
QLPYVLGSAYQGCLPPFPADVFMVPQYGYLTLNNGSQALGRSSFYCLEYF
PSQMLRTGNNFQFSYTFEDVPFHSSYAHSQSLDRLMNPLIDQYLYYLVRT
QTTGTGGTQTLAFSQAGPSSMANQARNWVPGPCYRQQRVSTTTNQNNNSN
FAWTGAAKFKLNGRDSLMNPGVAMASHKDDDDRFFPSSGVLIFGKQGTGN
DGVDYSQVLITDEEEIKATNPVATEEYGAVAINNQAANTQAQTGLVHNQG
VIPGMVWQNRDVYLQGPIWAKIPHTDGNFHPSPLMGGFGLKHPPPQILIK
NTPVPADPPLTFNQAKLNSFITQYSTGQVSVEIEWELQKENSKRWNPEIQ
YTSNYYKSTNVDFAVNTEGVYSEPRPIGTRYLTRNL

[0246] The VP1 sequence of an AAV capsid isolated from formosan macaque (denoted as Bfm.17) is set out as SEQ ID NO:79 and (amino acids 1-737) and the locations of the associated variable regions and GBS and GH loop regions are defined in Table 5 below. The VP2 capsid protein spans amino acids 138-736 of SEQ ID NO:79 and the VP3 capsid protein spans amino acids 203-736 of SEQ ID NO:79.

(SEQ ID NO: 79)
MAADGYLPDWLEDNLSEGIREWWALKPGAPKPKANQQKQDDGRGLVLPGY
KYLGPFNGLDKGEPVNAADAAALEHDKAYDQQLQAGDNPYLRYNHADAEF
QERLQEDTSFGGNLGRAVFQAKKRVLEPLGLVEEGAKTAPGKKRPVEQSP
QEPDSSSGIGKKGQQPAKKRLNFGQTGDSESVPDPQPLGEPPAAPSSLGL
NTMAAGGGAPMADNNEGADGVGSSSGNWHCDSTRLGDRVITTSTRTWALP
TYNNHLYKQISNGTSGGSTNDNTYFGYSTPWGYFDFNRFHCHFSPRDWQR
LINNNWGFRPKKLSFKLFNIQVKEVTQNEGTKTIANNLTSTIQVFTDSEY
QLSYVLGSAHQGCLPPFPADVFMIPQYGYLTLNNGSQAVGRSSFYCLEYF
PSQMLRTGNNFSFSYTFEDVPFHSSYAHSQSLDRLMNPLIDQYLYYLSRT
QSTGGTAGTQQLLFSQAGPNNMSAQAKNWLPGPMYRQQRVSTTLSQNNNS
NFAWTGGTKYHLNGRDSLVNPGVAMATNKDDEDRFFPSSGVLMFGKQGAG
KDNVDYSSVMLTSEEEIKTTNPVATEQYGVVADNLQQQNTAPIVGAVNSQ
EALPGMVWQNRDVYLQGPIWAKIPHTDGNFHPSPLMGGFGLKHPPPQILI
KNTPVPADPPTAFNQAKLNSFITQYSTGQVSVEIEWELQKENSKRWNPEI
QYTSNYYKSTNVDFAVDTEGVYSEHRPIGTRYLTRNL

[0247] The VP1 sequence of an AAV capsid isolated from formosan macaque (denoted as Bfm.18) is set out as SEQ ID NO:80 and (amino acids 1-737) and the locations of the associated variable regions and GBS and GH loop regions are defined in Table 5 below. The VP2 capsid protein spans amino acids 138-736 of SEQ ID NO:80 and the VP3 capsid protein spans amino acids 203-736 of SEQ ID NO:80.

(SEQ ID NO: 80)
MAADGYLPDWLEDNLSEGIREWWALKPGAPKPKANQQKQDDGRGLVLPGY
KYLGPFNGLDKGEPVNAADAAALEHDKAYDQQLQAGDNPYLRYNHADAEF
QERLQEDTSFGGNLGRAVFQAKKRVLEPLGLVEEGAKTAPGKKRPVEQSP
QEPDSSSGIGKKGQQPAKKRLNFGQTGDSESVPDPQPLGEPPAAPSSLGL
NTMAAGGGAPMADNNEGADGVGSSSGNWHCDSTWLGDRVITTSTRTWALP
TYNNHLYKQISNGTSGGSTNDNTYFGYSTPWGYFDFNRFHCHFSPRDWQR
LINNNWGFRPKKLSFKLFNIQVKEVTQNEGTKTIANNLTSTIQVFTDSEY
QLPYVPGSAHQGCLPPFPADVFMIPQYGYLTLNNGSQAVGRSSFYCLEYF
PSQMLRTGNNFSFSYTFEDVPFHSSYAHSQSLDRLMNPLIDQYLYYLSRT
QSTGGTAGTQQLLFSQAGPNNMSAQAKNWLPGPMYRQQRVSTTLSQNNNS
NFAWTGGTKYHLNGRDSLVNPGVAMATNKDDEDRFFPSSGVLMFGKQGAG
KDNVDYSSVMLTSEEEIKTTNPVATEQYGVVADNLQQQNTAPIVGAVNSQ
GALPGMVWQNRDVYPQGPIWAKIPHTDGNFHPSPLMGGFGLKHPPPQILI
KNTPVPADPPTAFNQAKLNSFITQYSTGQVSVEIEWELQKENSKRWNPEI
QYTSNYYKSTNVDFAVNTEGVYSEPRPIGTRYLTRNL

[0248] The VP1 sequence of an AAV capsid isolated from formosan macaque (denoted as Bfm.20) is set out as SEQ ID NO:81 and (amino acids 1-737) and the locations of the associated variable regions and GBS and GH loop regions are defined in Table 5 below. The VP2 capsid protein spans amino acids 138-736 of SEQ ID NO:81 and the VP3 capsid protein spans amino acids 203-736 of SEQ ID NO:81.

(SEQ ID NO: 81)
MAADGYLPDWLEDNLSEGIREWWALKPGAPKPKANQQKQDDGRGLVLPGY
KYLGPFNGLDKGEPVNAADAAALEHDKAYDQQLQAGDNPYLRYNHADAEF
QERLQEDTSFGGNLGRAVFQAKKRVLEPPGLVEEGAKTAPGKKRPVEQSP
QEPDSSSGIGKKGQQPAKKRLNFGQTGDSESVPDPQPLGEPPAAPSSLGL
NTMAAGGGAPMADNNEGADGVGSSSGNWHCDSTWLGDRVITTSTRTWALP
TYNNHLYKQISNGTSGGSTNDNTYFGYSTPWGYFDFNRFHCHFSPRDWQR
LINNNWGFRPKKLSFKLFNIQVKEVTQNEGTKTIANNLTSTIQVFTDSEY
QLPYVLGSAHQGCLPPFPADVFMIPQYGYLTLNNGSQAVGRSFFYCLEYF
PSQMLRTGNNFSFSYTFEDVPFHSSYAHSQSLDRLMNPLIDQYLYYLSRT
QSTGGTAGTQQLLFSQAGPNNMSAQAKNWLPGPMYRQQRVSTTLSQNNNS
NFAWTGGTKYHLNGRDSLVNPGVAMATNKDDEDRFFPSSGVLMFGKQGAG
KDNVDYSSVMLTSEEEIKTTNPVATEQYGVVADNLQQQNTAPIVGAVNSQ
GALPGMVWQNRDVYLQGPIWAKIPHTDGNFHPSPLMGGFGLKHPPPQILI
KNTPVPADPPTAFNQAKLNSFITQYSTGQVSVEIERELQKENSKRWNPEI
QYTSNYYKSTNVDFAVNTEGVYSEPRPIGTRYLTRNL

[0249] The VP1 sequence of an AAV capsid isolated from formosan macaque (denoted as Bfm.21) is set out as SEQ ID NO:82 and (amino acids 1-737) and the locations of the associated variable regions and GBS and GH loop regions are defined in Table 5 below. The VP2 capsid protein spans amino acids 138-736 of SEQ ID NO:82 and the VP3 capsid protein spans amino acids 203-736 of SEQ ID NO:82.

(SEQ ID NO: 82)
MAADGYLPDWLEDNLSEGIREWWALKPGAPKPKANQQKQDDGRGLVLPGY
KYLGPFNGLDKGEPVNAADAAALEHDKAYDQQLQAGDNPYLRYNHADAEF
QERLQEDTSFGGNLGRAVFQAKKRVLEPLGLVEEGAKTAPGKERPVEQSP
QEPDSSSGIGKKGQQPAKKRLNFGQTGDSESVPDPQPLGEPPAAPSSLGL
NTMAAGGGAPMADNNEGADGVGSSSGNWHCDSTWLGDRVITTSTRTWALP
TYNNHLYKQISNGTSGGSTNDNTYEGYSTPWGYFDENREHCHFSPRDWQR
LINNNWGFRPKKLSFKLFNIQVKEVTQNEGTKTIANNLTSTIQVFTDSEY
QLPYVLGSAHQGCLPPFPADVFMIPQYGYLTLNNGSQAVGRSSFYCLEYF
PSQMLRTGNNFSFSYTFEDVPFHSSYAHSQSLDRLMNPLIDQYLYYLSRT
QSTGGTAGTQQLLFSQAGPNNMSAQAKNWLPGPMYRQQRVSTTLSQNNNS
NFAWTGGTKYHLNGRDSLVNPGVAMATNKDDEDRFFPSSAVLMFGKQGAG
KDNVDYSSVMLTSEEEIKTTNPVTTEQYGVVADNLQQQNTAPIVGAVNSQ
GALPGMVWQNRDVYLQGPIWAKIPHTDGNFHPSPLMGGFGLKHPPPQILI
KNTPVPADPPTAFNQAKLNSFITQYSTGQVSVEIEWELQKENSKRWNPEI
QYTSNYYKSTNVDFAVNTESVYSEPRPIGTRYLTRNL

[0250] The VP1 sequence of an AAV capsid isolated from formosan macaque (denoted as Bfm.24) is set out as SEQ ID NO:83 and (amino acids 1-737) and the locations of the associated variable regions and GBS and GH loop regions are defined in Table 5 below. The VP2 capsid protein spans amino acids 138-736 of SEQ ID NO:83 and the VP3 capsid protein spans amino acids 203-736 of SEQ ID NO:83.

(SEQ ID NO: 83)
MAADGYLPDWLEDNLSEGIREWWALKPGAPKPKANQQKQDDGRGLVLPGY
KYLGPFNGPDKGEPVNAADAAALEHDKAYDQQLQAGDNPYLRYNHADAEF
QERLQEDTSFGGNLGRAVFQAKKRVLEPLGLVEEGAKTAPGKKRPVEQSP
QEPDSSSGIGKKGQQPAKKRLNFGQTGDSESVPDPQPLGEPPAAPSSLGL
NTMAAGGGAPMADNNEGADGVGSSSGNWHCDSTWLGDRVITTSTRTWALP
TYNNHLYKQISNGTSGGSTNDNTYFGYSTPWGYFDFNRSHCHFSPRDWQR
LINNNWGFRPKKLSFKLFNIQVKEVTQNEGTKTIANNLTSTIQVFTDSEY
QLPYVLGSAHQGCLPPFPADVFMIPQYGYLTLNNGSQAVGRSSFYCLEYF
PSQMLRTGNNFSFSYTFEDVPFHSSYAHSQSLDRLMNPLIDQYLYYLSRT
QSTGGTAGTQQLLFSQAGPNNMSAQAKNWLPGPMYRQQRVSTTLSQNNNS
NFAWTGGTKYHLNGRDSLVNPGVAMATNKDDEDRFFPSSGVLMFGKQGAG
KDNVDYSSVMLTSEEEIRTTNPVATEQYGVVADNLQQQNTAPIVGAVNSQ
GALPGMVWQNRDVYLQGPIWAKIPHTDGNFHPSPLMGGFGLKHPPPQILI
KNTPVPADPPTAFNQAKLNSFITQYSTGQVSVEIEWELQKENSKRWNPEI
QYTSNYYKSTNVDFAVNTEGVYSEPRPIGTRYLTRNL

[0251] The VP1 sequence of an AAV capsid isolated from formosan macaque (denoted as Bfm.25) is set out as SEQ ID NO:84 and (amino acids 1-737) and the locations of the associated variable regions and GBS and GH loop regions are defined in Table 5 below. The VP2 capsid protein spans amino acids 138-736 of SEQ ID NO:84 and the VP3 capsid protein spans amino acids 203-736 of SEQ ID NO:84.

(SEQ ID NO: 84)
MAADGYLPDWLEDNLSEGIREWWALKPGAPKPKANQQKQDDGRGLVLPGY
KYLGPFNGLDKGEPVNAADAAALEHDKAYDQQLQAGDNPYLRYNHADAEF
QERLQEDTSFGGNLGRAVFQAKKRVLEPLGLVEEGAKTAPGKKRPVEQSP
QEPDSSSGIGKKGQQPAKKRLNFGQTGDSESVPDPQPLGEPPAAPSSLGL
NTMAAGGGAPMADNNEGADGVGSSSGNWHCDSTWLGDRVITTSTRTWALP
TYNNHLYKQISNGTSGGSTNDNTYFGYSTPWGYFDFNRFHCHFSPRDWQR
LINNNWGFRPKKLSFKLFNIQVKEVTQNEGTKTIANNLTSTIQVFTDSEY
QLPYVLGSAHQGCLPPFPADVFMIPQYGYLTLNNGSQAVGRSSFYCLEYF
PSQMLRTGNNFSFSYTFEDVPFHSSYAHSQSLDRLMNPLIDQYLYYLSRT
QSTGGTAGTQQLLFSQAGPNNMSAQAKNWLPGPMYRQQRVSTTLSQNNNS
NFAWTGGTKYHLNGRDSLVNPGVAMATNKDDEDRLFPSSGVLMFGKQGAG
KDNVDYSSVMLTSEEEVKTTNPVATEQYGVVADNLQQQNTAPIVGAVNSQ
GALPGMVWQNRDVYLQGPIWAKIPHTDGNFHPSPLMGGFGLKHPPPQILI
KNTPVPADPPTAFNQAKLNSFITQYSTGQVSVEIEWELQKENSKRWNPEI
QYTSNYYKSTNVDFAVNTEGVYSEPRPIGTRYLTRNL

[0252] The VP1 sequence of an AAV capsid isolated from formosan macaque (denoted as Bfm.27) is set out as SEQ ID NO:85 and (amino acids 1-737) and the locations of the associated variable regions and GBS and GH loop regions are defined in Table 5 below. The VP2 capsid protein spans amino acids 138-736 of SEQ ID NO:85 and the VP3 capsid protein spans amino acids 203-736 of SEQ ID NO:85.

(SEQ ID NO: 85)
MAADGYLPDWLEDNLSEGIREWWALKPGAPKPKANQQKQDDGRGLVLPGY
KYLGPFNGLDKGEPVNAADAAALEHDKAYDQQLQAGDNPYLRYNHADAEF
QERLQEDTSFGGNLGRAVFQAKRRVLEPLGLVEEGAKTAPGKKRPVEQSP
QEPDSSSGIGKKGQQPAKKRLNFGQTGDSESVPDPQPLGEPPAAPSSLGL
NTMAAGGGAPMADNNEGADGVGSSSGNWHCDSTWLGDRVITTSTRTWALP
TYNNHLYKQISNGTSGGSTNDNTYEGYSTPWGYFDENREHCHFSPRDWQR
LINNNWGFRPKKLSFKLFNIQVKEVTQNEGTKTIANNLTSTIQVFTDSEY
QLPYVLGSARQGCLPPFPADVFMIPQYGYLTLNNGSQAVGRSSFYCLEYF
PSQMLRTGNNFSFSYTFEDVPFHSSYAHSQSLDRLMNPLIDQYLYYLSRT
QSTGGTAGTQQLLFSQAGPNNMSAQAKNWLPGPMYRQQRVSTTLSQNNNS
NFAWTGGTKYHLNGRDSLVNPGVAMATNKDDEDRFFPSSGVLMFGKQGAG
KDNVDYSSVMLTSEEEIKTTNPVATEQYGVVADNLQQQNTAPIVGAVNSQ
GALPGMVWQNRDVYLQGPIWAKIPHTDGNFHPSPLMGGFGLKHPPPQILI
KNTPVPADPPTAFNQAKLNSFITQYSTGQVSVEIEWELQKENSKRWNPEI
QYTSNYYKSTNVDFAVDTEGVYSEPRPIGTRYLTRNL

[0253] The VP1 sequence of an AAV capsid isolated from formosan macaque (denoted as Bfm.32) is set out as SEQ ID NO:86 and (amino acids 1-737) and the locations of the associated variable regions and GBS and GH loop regions are defined in Table 5 below. The VP2 capsid protein spans amino acids 138-736 of SEQ ID NO:86 and the VP3 capsid protein spans amino acids 203-736 of SEQ ID NO:86.

(SEQ ID NO: 86)
MAADGYLPDWLEDNLSEGIREWWALKPGAPKPKANQQKQDDGRGLVLPGY
KYLGPFNGLDKGEPVNAADAAALEHDKAYDQQLQAGDNPYLRYNHADAEF
QERLQEDTSFGGNLGRAVFQAKKRVLEPLGLVEEGAKTAPGKKRPVEQSP
QEPDSSSGIGKKGQQPAKKRLNFGQTGDSESVPDPQPLGEPPAAPSSLGL
NTMAAGGGAPMADNNEGADGVGSSSGNWHCDSTWLGDRVITTSTRTWALP
TYNNHLYKQISNGTSGGSTNDNTYFGYSTPWGYFDFNRFHCHFSPRDWQR
LINNNWGFRPKKLSFKLFDIQVKEVTQNEGTKTIANNLTSTIQVFTDSEY
QLPYVLGSAHQGCLPPFPADVFMIPQYGYLTLNNGSQAVGRSSFYCLEYF
PSQMLRTGNNFSFSYTFEDVPFHSSYAHSQSLDRLMNPLIDQYLYYLSRT
QSTGGTAGTQQLLFSQAGPNNMSAQAKNWLPGPMYRQQRVSTTLSQNNNS
NFAWTGGTKYHLNGRDSLVNPGVAMATNKDDEDRFFPSSGVLMFGKQGAG
KDNVDYSSVMLTSEEEIKTTNPVATEQYGVVADNLQQQNTAPIVGAVNSQ
GALPGMVWQNRDVYLQGPIWAKIPHTDGNFHPSPLMGGFGLKHPPPQILI
KNTPVPADPPTAFNQAKLNSFITQYSTGQVSVEIEWELQKENSKRWNPEI
QYTSNYYKSTNVDFAVNTEGVYSEPRPIGTRYLTRNL

[0254] The VP1 sequence of an AAV capsid isolated from formosan macaque (denoted as Bfm.33) is set out as SEQ ID NO:87 and (amino acids 1-737) and the locations of the associated variable regions and GBS and GH loop regions are defined in Table 5 below. The VP2 capsid protein spans amino acids 138-736 of SEQ ID NO:87 and the VP3 capsid protein spans amino acids 203-736 of SEQ ID NO:87.

(SEQ ID NO: 87)
MAADGYLPDWLEDNLSEGIREWWALKPGAPKPKANQQKQDDGRGLVLPGY
KYLGPFNGLDKGEPVNAADAAALEHDKAYDQQLQAGDNPYLRYNHADAEF
QERLQEDTSFGGNLGRAVFQAKKRVLEPLGLVEEGAKTAPGKKRPVEQSP
QEPDSSSGIGKKGQQPAKKRLNFGQTGDSESVPDPQPLGEPPAAPSSLGL
NTMAAGGGAPMADNNEGADGVGSSSGNWHCDSTWLGDRVITTSTRTWALP
TYNNHLYKQISNGTSGGSTNDNTYFGYSTPWGYFDFNRFHCHFSPRDWQR
LINNNWGFRPKKLSFKLFNIQVKEVTQNEGTKTIANNLTSTIQVFTDSEY
QLPYVLGSAHQGCLPPFPADVFMIPQYGYLTLNNGSQAVGRSSFYCLEYF
PSQMLRTGNNFSFSYTFEDVPFHSSYAHSQSLDRLMNPLIDQYLYYLSRT
QSTGGTAGTQQLLFSQAGPNNMSAQAKNWLPGPMYRQQRVSTTLSQNNNS
NFAWTGGTKYHLNGRDSLVNPGVAMATNKDDEDRFFPSSAVLMFGKQGAG
KDNVDYSSVMLTSEEEIKTTNPVATEQYGVVADNLQQQNTAPIVGAVNSQ
GALPGMVWQNRDVYLQGPIWAKIPHTDGNFHPSPLMGGFGLKHPPPQILI
KNTPVPADPPTAFNQAKLNSFITQYSTGQVSVEIEWELQKENSKRWNPEI
QYTSNYYKSTNVDFAVNTESVYSEPRPIGTRYLTRNL

[0255] The VP1 sequence of an AAV capsid isolated from formosan macaque (denoted as Bfm.34) is set out as SEQ ID NO:88 and (amino acids 1-737) and the locations of the associated variable regions and GBS and GH loop regions are defined in Table 5 below. The VP2 capsid protein spans amino acids 138-736 of SEQ ID NO:88 and the VP3 capsid protein spans amino acids 203-736 of SEQ ID NO:88.

(SEQ ID NO: 88)
MAADGYLPDWLEDNLSEGIREWWALKPGAPKPKANQQKQDDGRGLVLPGY
KYLGPFNGLDKGEPVNAADAAALEHDKAYDQQLQAGDNPYLRYNHADAEF
QERLQEDTSFGGNLGRAVFQAKKRVLEPLGLVEEGAKTAPGKKRPVEQSP
QEPDSSSGIGKKGQQPAKKRLNFGQTGDSESVPDPQPLGEPPAAPSSLGL
NTMAAGGGAPMADNNEGADGVGSSSGNWHCDSTWLGDRVITTSTRTWALP
TYNNHLYKQISNGTSGGSTNDNTYFGYSTPWGYFDFNRFHCHFSPRDWQR
LINNNWGFRPKKLSFKLFNIQVKEVTQNEGTKTIANNLTSTIQVFTDSEY
QLPYVLGSAHQGCLPPFPADVFMIPQYGYLTLNNGSQAVGRSSFYCLEYF
PSQMLRTGNNFSFSYTFEDVPFHSSYAHSQSLDRLMNPLIDQYLYYLSRT
QSTGGTAGTQQLLFSQAGPNNMSAQAKNWLPGPMYRQQRVSTTLSQNNNS
NFAWTGGTKYHLNGRDSLVYPGVAMATNKDDEDRFFPSSGVLMFGKQGAG
KDNVDYSSVMLTSEEEIKTTNPVATEQYGVVADNLQQQNTAPIVGAVNSQ
GALPGMVWQNRDVYLQGPIWAKIPHTDGNFHPSPLMGGFGLKHPPPQILI
KNTPVPADPPTAFNQAKLNSFITQYSTGQVSVEIEWELQKENSKRWNPEI
QYTSNYYKSTNVDFAVNTEGVYSEPRPIGTRYLTRNL

[0256] The VP1 sequence of an AAV capsid isolated from formosan macaque (denoted as Bfm.35) is set out as SEQ ID NO:89 and (amino acids 1-737) and the locations of the associated variable regions and GBS and GH loop regions are defined in Table 5 below. The VP2 capsid protein spans amino acids 138-736 of SEQ ID NO:89 and the VP3 capsid protein spans amino acids 203-736 of SEQ ID NO:89.

(SEQ ID NO: 89)
MAADGYLPDWLEDNLSEGIREWWALKPGAPKPKANQQKQDDGRGLVLPGY
KYLGPFNGLDKGGPVNAADAAALEHDKAYDQQLQAGDNPYLRYNHADAEF
RERLQEDTSFGGNLGRAVFQAKKRVLEPLGLVEEGAKTAPGKKRPVEQSP
QEPDSSSGIGKKGQQPAKKRLNFGQTGDSESVPDPQPLGEPPAAPSSLGL
NTMAAGGGAPMADNNEGADGVGSSSGNWHCDSTWLGDRVITTSTRTWALP
TYNNHLYKQISNGTSGGSTNDSTYEGYSTPWGYFDENRSHCHFSPRDWQR
LINNNWGFRPKKLSFKLFNIQVKEVTQNEGTKTIANNLTSTIQVFTDSEY
QLPYVLGSAHQGCLPPFPADVFMIPQYGYLTLNNGGQAVGRSSFYCLEYF
PSQMLRTGNNESFSYIFEDVPFHSSYAHSQSLDRLMNPLIDQYLYYLSRT
QSTGGTAGTQQLLFSQAGPNNMSAQAKNWLPGPMYRQQRVSTTLSQNNNS
NFAWTGGTKYHLNGRDSLVNPGVAMATNKDDEDRFFPSSGVLMFGKQGAG
KDNVDYSSVMLTSEEEIKTTNPVATEQYGVVADNLQQQNTAPIVGAVNSQ
GALPGMVWQNRDVYLQGPIWAKIPHTDGNFHPSPLMGGFGLKHPPPQILI
KNTPVPADPPTAFNQAKLNSFITQYSTGQVSVEIEWELLKESSKRWNPEI
QYTSNYYKSTNVDFAVNTEGVYSEPRPIGTRYLTRNL

[0257] The VP1 sequence of AAV5 capsid is set out as SEQ ID NO:5 (amino acids 1-724) and the locations of the associated variable regions and GBS and GH loop regions are defined in Table 5 below. The VP2 capsid protein spans amino acids 137-724 (TAPTGK . . . TRPL) of SEQ ID NO:5 and the VP3 capsid protein spans amino acids 193-724 (MSAGGG . . . TRPL) of SEQ ID NO:5.

[0258] The VP1 sequence of AAV8 capsid is set out as SEQ ID NO:9 (amino acids 1-738) and the locations of the associated variable regions and GBS and GH loop regions are defined in Table 5 below. The VP2 capsid protein spans amino acids 138-738 (TAPGKK . . . TRNL) of SEQ ID NO:9 and the VP3 capsid protein spans amino acids 204-738 (MAAGGG . . . TRNL) of SEQ ID NO:9.

[0259] The VP1 sequence of AAVBo capsid is set out as SEQ ID NO:1 (amino acids 1-736) and the locations of the associated variable regions and GBS and GH loop regions are defined in Table 5 below. The VP2 capsid protein spans amino acids 140-736 (TAPAAK . . . TNHL) of SEQ ID NO:1 and the VP3 capsid protein spans amino acids 204-736 (MRAAGG . . . TNHL) of SEQ ID NO:1.

[0260] The VP1 sequence of Rh10 capsid is set out as SEQ ID NO:12 (amino acids 1-738) and the locations of the associated variable regions and GBS and GH loop regions are defined in Table 5 below. The VP2 capsid protein spans amino acids 138-738 (TAPGKK . . . TRNL) of SEQ ID NO:12 and the VP3 capsid protein spans amino acids 204-738 (MAAGGG . . . TRNL) of SEQ ID NO:12.

[0261] The VP1 sequence of LK03 capsid is set out as SEQ ID NO:173 (amino acids 1-738) and the locations of the associated variable regions and GBS and GH loop regions are defined in Table 5 below. The VP2 capsid protein spans amino acids 138-738 (TAPGKK . . . TRNL) of SEQ ID NO:173 and the VP3 capsid protein spans amino acids 204-738 (MAAGGG . . . TRNL) of SEQ ID NO:173.

[0262] In Table 5 below, “VR” refers to the variable region and the numbers refer to the amino acid residues each variable region or the GBS and GH loop regions span in the amino acid sequence.

TABLE 5

| AAV | VRI | VRII | VRIII | VRIV | GBS | VRV | VRVI | VRVII | VRVIII | VRIX | GHloop |
|---|---|---|---|---|---|---|---|---|---|---|---|
| AAV2 | 262- | 325- | 380- | 450- | 464- | 487- | 526- | 544- | 580- | 703- | 446- |
| (SEQ ID | 268 | 330 | 384 | 459 | 475 | 504 | 538 | 557 | 592 | 711 | 600 |
| NO: 3) | | | | | | | | | | | |
| AAV4 | 256- | 316- | 372- | 444- | 459- | 481- | 526- | 542- | 579- | 702- | 440- |
| (SEQ ID | 260 | 321 | 378 | 454 | 470 | 504 | 536 | 556 | 591 | 710 | 599 |
| NO: 4) | | | | | | | | | | | |
| AAV5 | 252- | 316- | 372- | 443- | 452- | 474- | 513- | 531- | 570- | 692- | 439- |
| (SEQ ID | 258 | 321 | 377 | 446 | 462 | 491 | 525 | 547 | 582 | 700 | 590 |
| NO: 5) | | | | | | | | | | | |
| AAV6 | 262- | 326- | 381- | 451- | 465- | 488- | 527- | 545- | 581- | 704- | 447- |
| (SEQ ID | 269 | 331 | 385 | 460 | 476 | 505 | 539 | 558 | 593 | 712 | 601 |
| NO: 6) | | | | | | | | | | | |
| AAV6.2 | 262- | 326- | 381- | 451- | 465- | 488- | 527- | 545- | 581- | 704- | 447- |
| (SEQ ID | 269 | 331 | 385 | 460 | 476 | 505 | 539 | 558 | 593 | 712 | 601 |
| NO: 7) | | | | | | | | | | | |
| AAV7 | 263- | 327- | 382- | 452- | 467- | 490- | 529- | 547- | 582- | 705- | 448- |
| (SEQ ID | 270 | 332 | 386 | 462 | 478 | 507 | 541 | 559 | 594 | 713 | 602 |
| NO: 8) | | | | | | | | | | | |
| AAV8 | 263- | 328- | 383- | 453- | 467- | 490- | 529- | 548- | 583- | 706- | 449- |
| (SEQ ID | 271 | 333 | 387 | 462 | 478 | 507 | 541 | 560 | 595 | 714 | 603 |
| NO: 9) | | | | | | | | | | | |
| AAV9 | 262- | 327- | 382- | 452- | 465- | 488- | 527- | 545- | 581- | 704- | 448- |
| (SEQ ID | 270 | 332 | 386 | 460 | 476 | 505 | 539 | 558 | 593 | 712 | 602 |
| NO: 10) | | | | | | | | | | | |
| AAVrh8 | 262- | 327- | 382- | 452- | 465- | 488- | 527- | 545- | 581- | 704- | 448- |
| (SEQ ID | 270 | 332 | 386 | 460 | 476 | 505 | 539 | 558 | 593 | 712 | 602 |
| NO: 11) | | | | | | | | | | | |
| AAVrh10 | 263- | 328- | 383- | 453- | 467- | 490- | 529- | 548- | 583- | 706- | 449- |
| (SEQ ID | 271 | 333 | 387 | 462 | 478 | 507 | 541 | 560 | 595 | 714 | 603 |
| NO: 12) | | | | | | | | | | | |
| AAVbo | 258- | 318- | 374- | 446- | 462- | 484- | 528- | 544- | 581- | 704- | 442- |
| (SEQ ID | 262 | 323 | 380 | 456 | 472 | 506 | 538 | 558 | 593 | 712 | 601 |
| NO: 1) | | | | | | | | | | | |
| AAVBba.21 | 265- | 325- | 381- | 452- | 468- | 490- | 534- | 550- | 587- | 710- | 448- |
| (SEQ ID | 269 | 330 | 386 | 462 | 478 | 512 | 544 | 564 | 599 | 718 | 607 |
| NO: 15) | | | | | | | | | | | |
| AAVBba.31 | 265- | 325- | 381- | 452- | 468- | 490- | 534- | 550- | 587- | 710- | 448- |
| (SEQ ID | 269 | 330 | 386 | 462 | 478 | 512 | 544 | 564 | 599 | 718 | 607 |
| NO: 20) | | | | | | | | | | | |
| AAVBba.32 | 265- | 325- | 381- | 452- | 468- | 490- | 534- | 550- | 587- | 710- | 448- |
| (SEQ ID | 269 | 330 | 386 | 462 | 478 | 512 | 544 | 564 | 599 | 718 | 607 |
| NO: 21) | | | | | | | | | | | |
| AAVBba.33 | 265- | 325- | 381- | 452- | 468- | 490- | 534- | 550- | 587- | 710- | 448- |
| (SEQ ID | 269 | 330 | 386 | 462 | 478 | 512 | 544 | 564 | 599 | 718 | 607 |
| NO: 22) | | | | | | | | | | | |
| AAVBpo.1 | 243- | 307- | 363- | 434- | 443- | 465- | 505- | 523- | 562- | 684- | 430- |
| (SEQ ID | 249 | 312 | 368 | 437 | 453 | 483 | 517 | 539 | 574 | 692 | 582 |
| NO: 53) | | | | | | | | | | | |
| AAVBpo.2 | 243- | 307- | 363- | 434- | 443- | 465- | 505- | 523- | 562- | 684- | 430- |
| (SEQ ID | 249 | 312 | 368 | 437 | 453 | 483 | 517 | 539 | 574 | 692 | 582 |
| NO: 54) | | | | | | | | | | | |
| AAVBpo.3 | 243- | 307- | 363- | 434- | 443- | 465- | 505- | 523- | 562- | 684- | 430- |
| (SEQ ID | 249 | 312 | 368 | 437 | 453 | 483 | 517 | 539 | 574 | 692 | 582 |
| NO: 55) | | | | | | | | | | | |
| AAVBpo.4 | 243- | 307- | 363- | 434- | 443- | 465- | 505- | 523- | 562- | 684- | 430- |
| (SEQ ID | 249 | 312 | 368 | 437 | 453 | 483 | 517 | 539 | 574 | 692 | 582 |
| NO: 56) | | | | | | | | | | | |
| AAVBpo.6 | 243- | 307- | 363- | 434- | 443- | 465- | 505- | 523- | 562- | 684- | 430- |
| (SEQ ID | 249 | 312 | 368 | 437 | 453 | 483 | 517 | 539 | 574 | 692 | 582 |
| NO: 57) | | | | | | | | | | | |
| AAVBpo.8 | 243- | 307- | 363- | 434- | 443- | 465- | 505- | 523- | 562- | 684- | 430- |
| (SEQ ID | 249 | 312 | 368 | 437 | 453 | 483 | 517 | 539 | 574 | 692 | 582 |
| NO: 58) | | | | | | | | | | | |
| AAVBpo.13 | 243- | 307- | 363- | 434- | 443- | 465- | 505- | 523- | 562- | 684- | 430- |
| (SEQ ID | 249 | 312 | 368 | 437 | 453 | 483 | 517 | 539 | 574 | 692 | 582 |
| NO: 59) | | | | | | | | | | | |
| AAVBpo.18 | 243- | 307- | 363- | 434- | 443- | 465- | 505- | 523- | 562- | 684- | 430- |
| (SEQ ID | 249 | 312 | 368 | 437 | 453 | 483 | 517 | 539 | 574 | 692 | 582 |
| NO: 60) | | | | | | | | | | | |
| AAVBpo.20 | 243- | 307- | 363- | 434- | 443- | 465- | 505- | 523- | 562- | 684- | 430- |
| (SEQ ID | 249 | 312 | 368 | 437 | 453 | 483 | 517 | 539 | 574 | 692 | 582 |
| NO: 61) | | | | | | | | | | | |
| AAVBpo.23 | 243- | 307- | 363- | 434- | 443- | 465- | 505- | 523- | 562- | 684- | 430- |
| (SEQ ID | 249 | 312 | 368 | 437 | 453 | 483 | 517 | 539 | 574 | 692 | 582 |
| NO: 62) | | | | | | | | | | | |
| AAVBpo.24 | 243- | 307- | 363- | 434- | 443- | 465- | 505- | 523- | 562- | 684- | 430- |
| (SEQ ID | 249 | 312 | 368 | 437 | 453 | 483 | 517 | 539 | 574 | 692 | 582 |
| NO: 63) | | | | | | | | | | | |
| AAVBpo.27 | 243- | 307- | 363- | 434- | 443- | 465- | 505- | 523- | 562- | 684- | 430- |
| (SEQ ID | 249 | 312 | 368 | 437 | 453 | 483 | 517 | 539 | 574 | 692 | 582 |
| NO: 64) | | | | | | | | | | | |
| AAVBpo.28 | 243- | 307- | 363- | 434- | 443- | 465- | 505- | 523- | 562- | 684- | 430- |
| (SEQ ID | 249 | 312 | 368 | 437 | 453 | 483 | 517 | 539 | 574 | 692 | 582 |
| NO: 65) | | | | | | | | | | | |
| AAVBpo.29 | 243- | 307- | 363- | 434- | 443- | 465- | 505- | 523- | 562- | 684- | 430- |
| (SEQ ID | 249 | 312 | 368 | 437 | 453 | 483 | 517 | 539 | 574 | 692 | 582 |
| NO: 66) | , | | | | | | | | | | |
| AAVBpo.33 | 243- | 307- | 363- | 434- | 443- | 465- | 505- | 523- | 562- | 684- | 430- |
| (SEQ ID | 249 | 312 | 368 | 437 | 453 | 483 | 517 | 539 | 574 | 692 | 582 |
| NO: 67) | | | | | | | | | | | |
| AAVBpo.35 | 243- | 307- | 363- | 434- | 443- | 465- | 505- | 523- | 562- | 684- | 430- |
| (SEQ ID | 249 | 312 | 368 | 437 | 453 | 483 | 517 | 539 | 574 | 692 | 582 |
| NO: 68) | | | | | | | | | | | |
| AAVBpo.36 | 243- | 307- | 363- | 434- | 443- | 465- | 505- | 523- | 562- | 684- | 430- |
| (SEQ ID | 249 | 312 | 368 | 437 | 453 | 483 | 517 | 539 | 574 | 692 | 582 |
| NO: 69) | | | | | | | | | | | |
| AAVBpo.37 | 243- | 307- | 363- | 434- | 443- | 465- | 505- | 523- | 562- | 684- | 430- |
| (SEQ ID | 249 | 312 | 368 | 437 | 453 | 483 | 517 | 539 | 574 | 692 | 582 |
| NO: 70) | | | | | | | | | | | |
| AAVmo | 249- | 310- | 366- | 437- | 443- | 467- | 507- | 525- | 556- | 679- | 433- |
| (SEQ ID | 252 | 315 | 371 | 439 | 455 | 484 | 519 | 533 | 568 | 689 | 576 |
| NO: 2) | | | | | | | | | | | |
| AAVBce.14 | 262- | 327- | 382- | 452- | 465- | 488- | 527- | 545- | 581- | 704- | 448- |
| (SEQ ID | 270 | 332 | 386 | 460 | 476 | 505 | 539 | 558 | 593 | 712 | 602 |
| NO: 32) | | | | | | | | | | | |
| AAVBce.15 | 262- | 327- | 382- | 452- | 465- | 488- | 527- | 545- | 581- | 704- | 448- |
| (SEQ ID | 270 | 332 | 386 | 460 | 476 | 505 | 539 | 558 | 593 | 712 | 602 |
| NO: 33) | | | | | | | | | | | |
| AAVBce.16 | 262- | 327- | 382- | 452- | 465- | 488- | 527- | 545- | 581- | 704- | 448- |
| (SEQ ID | 270 | 332 | 386 | 460 | 476 | 505 | 539 | 558 | 593 | 712 | 602 |
| NO: 34) | | | | | | | | | | | |
| AAVBce.17 | 262- | 327- | 382- | 452- | 465- | 488- | 527- | 545- | 581- | 704- | 448- |
| (SEQ ID | 270 | 332 | 386 | 460 | 476 | 505 | 539 | 558 | 593 | 712 | 602 |
| NO: 35) | | | | | | | | | | | |
| AAVBce.18 | 262- | 327- | 382- | 452- | 465- | 488- | 527- | 545- | 581- | 704- | 448- |
| (SEQ ID | 270 | 332 | 386 | 460 | 476 | 505 | 539 | 558 | 593 | 712 | 602 |
| NO: 36) | | | | | | | | | | | |
| AAVBce.20 | 262- | 327- | 382- | 452- | 465- | 488- | 527- | 545- | 581- | 704- | 448- |
| (SEQ ID | 270 | 332 | 386 | 460 | 476 | 505 | 539 | 558 | 593 | 712 | 602 |
| NO: 37) | | | | | | | | | | | |
| AAVBma.42 | 262- | 327- | 382- | 452- | 465- | 488- | 527- | 545- | 581- | 704- | 448- |
| (SEQ ID | 270 | 332 | 386 | 460 | 476 | 505 | 539 | 558 | 593 | 712 | 602 |
| NO: 51) | | | | | | | | | | | |
| AAVBma.43 | 262- | 327- | 382- | 452- | 465- | 488- | 527- | 545- | 581- | 704- | 448- |
| (SEQ ID | 270 | 332 | 386 | 460 | 476 | 505 | 539 | 558 | 593 | 712 | 602 |
| NO: 52) | | | | | | | | | | | |
| AAVBce.39 | 262- | 327- | 382- | 452- | 465- | 488- | 527- | 545- | 581- | 704- | 448- |
| (SEQ ID | 270 | 332 | 386 | 460 | 476 | 505 | 539 | 558 | 593 | 712 | 602 |
| NO: 40) | | | | | | | | | | | |
| AAVBce.40 | 262- | 327- | 382- | 452- | 465- | 488- | 527- | 545- | 581- | 704- | 448- |
| (SEQ ID | 270 | 332 | 386 | 460 | 476 | 505 | 539 | 558 | 593 | 712 | 602 |
| NO: 41) | | | | | | | | | | | |
| AAVBce.41 | 262- | 327- | 382- | 452- | 465- | 488- | 527- | 545- | 581- | 704- | 448- |
| (SEQ ID | 270 | 332 | 386 | 460 | 476 | 505 | 539 | 558 | 593 | 712 | 602 |
| NO: 42) | | | | | | | | | | | |
| AAVBce.42 | 262- | 327- | 382- | 452- | 465- | 488- | 527- | 545- | 581- | 704- | 448- |
| (SEQ ID | 270 | 332 | 386 | 460 | 476 | 505 | 539 | 558 | 593 | 712 | 602 |
| NO: 43) | | | | | | | | | | | |
| AAVanc110 | 262- | 327- | 382- | 452- | 465- | 488- | 527- | 545- | 581- | 704- | 448- |
| (SEQ ID | 270 | 332 | 386 | 460 | 476 | 505 | 539 | 558 | 593 | 712 | 602 |
| NO: 14) | | | | | | | | | | | |
| AAVanc80 | 262- | 326- | 381- | 451- | 465- | 488- | 527- | 545- | 581- | 704- | 447- |
| (SEQ ID | 269 | 331 | 385 | 460 | 476 | 505 | 539 | 558 | 593 | 712 | 601 |
| NO: 13) | | | | | | | | | | | |
| AAVBce.35 | 258- | 322- | 377- | 447- | 460- | 483- | 522- | 540- | 575- | 698- | 443- |
| (SEQ ID | 265 | 327 | 381 | 455 | 471 | 500 | 534 | 552 | 587 | 706 | 595 |
| NO: 38) | | | | | | | | | | | |
| AAVBce.36 | 258- | 322- | 377- | 447- | 460- | 483- | 522- | 540- | 575- | 698- | 443- |
| (SEQ ID | 265 | 327 | 381 | 455 | 471 | 500 | 534 | 552 | 587 | 706 | 595 |
| NO: 39) | | | | | | | | | | | |
| AAVBce.43 | 258- | 322- | 377- | 447- | 460- | 483- | 522- | 540- | 575- | 698- | 443- |
| (SEQ ID | 265 | 327 | 381 | 455 | 471 | 500 | 534 | 552 | 587 | 706 | 595 |
| NO: 44) | | | | | | | | | | | |
| AAVBce.44 | 258- | 322- | 377- | 447- | 460- | 483- | 522- | 540- | 575- | 698- | 443- |
| (SEQ ID | 265 | 327 | 381 | 455 | 471 | 500 | 534 | 552 | 587 | 706 | 595 |
| NO: 45) | | | | | | | | | | | |
| AAVBce.45 | 258- | 322- | 377- | 447- | 460- | 483- | 522- | 540- | 575- | 698- | 443- |
| (SEQ ID | 265 | 327 | 381 | 455 | 471 | 500 | 534 | 552 | 587 | 706 | 595 |
| NO: 46) | | | | | | | | | | | |
| AAVBce.46 | 258- | 322- | 377- | 447- | 460- | 483- | 522- | 540- | 575- | 698- | 443- |
| (SEQ ID | 265 | 327 | 381 | 455 | 471 | 500 | 534 | 552 | 587 | 706 | 595 |
| NO: 47) | | | | | | | | | | | |
| AAVBcy.20 | 258- | 322- | 377- | 447- | 460- | 483- | 522- | 540- | 575- | 698- | 443- |
| (SEQ ID | 265 | 327 | 381 | 455 | 471 | 500 | 534 | 552 | 587 | 706 | 595 |
| NO: 48) | | | | | | | | | | | |
| AAVBcy.22 | 258- | 322- | 377- | 447- | 460- | 483- | 522- | 540- | 575- | 698- | 443- |
| (SEQ ID | 265 | 327 | 381 | 455 | 471 | 500 | 534 | 552 | 587 | 706 | 595 |
| NO: 49) | | | | | | | | | | | |
| AAVBcy.23 | 258- | 322- | 377- | 447- | 460- | 483- | 522- | 540- | 575- | 698- | 443- |
| (SEQ ID | 265 | 327 | 381 | 455 | 471 | 500 | 534 | 552 | 587 | 706 | 595 |
| NO: 50) | | | | | | | | | | | |
| AAVBba.26 | 265- | 328- | 383- | 453- | 469- | 492- | 531- | 549- | 584- | 707- | 449- |
| (SEQ ID | 271 | 333 | 387 | 464 | 480 | 508 | 543 | 561 | 596 | 715 | 604 |
| NO: 16) | | | | | | | | | | | |
| AAVBba.27 | 265- | 328- | 383- | 453- | 469- | 492- | 531- | 549- | 584- | 707- | 449- |
| (SEQ ID | 271 | 333 | 387 | 464 | 480 | 508 | 543 | 561 | 596 | 715 | 604 |
| NO: 17) | | | | | | | | | | | |
| AAVBba.29 | 265- | 328- | 383- | 453- | 469- | 492- | 531- | 549- | 584- | 707- | 449- |
| (SEQ ID | 271 | 333 | 387 | 464 | 480 | 508 | 543 | 561 | 596 | 715 | 604 |
| NO: 18) | | | | | | | | | | | |
| AAVBba.30 | 265- | 328- | 383- | 453- | 469- | 492- | 531- | 549- | 584- | 707- | 449- |
| (SEQ ID | 271 | 333 | 387 | 464 | 480 | 508 | 543 | 561 | 596 | 715 | 604 |
| NO: 19) | | | | | | | | | | | |
| AAVBba.34 | 265- | 328- | 383- | 453- | 469- | 492- | 531- | 549- | 584- | 707- | 449- |
| (SEQ ID | 271 | 333 | 387 | 464 | 480 | 508 | 543 | 561 | 596 | 715 | 604 |
| NO: 23) | | | | | | | | | | | |
| AAVBba.35 | 265- | 328- | 383- | 453- | 469- | 492- | 531- | 549- | 584- | 707- | 449- |
| (SEQ ID | 271 | 333 | 387 | 464 | 480 | 508 | 543 | 561 | 596 | 715 | 604 |
| NO: 24) | | | | | | | | | | | |
| AAVBba.36 | 265- | 328- | 383- | 453- | 469- | 492- | 531- | 549- | 584- | 707- | 449- |
| (SEQ ID | 271 | 333 | 387 | 464 | 480 | 508 | 543 | 561 | 596 | 715 | 604 |
| NO: 25) | | | | | | | | | | | |
| AAVBba.37 | 265- | 328- | 383- | 453- | 469- | 492- | 531- | 549- | 584- | 707- | 449- |
| (SEQ ID | 271 | 333 | 387 | 464 | 480 | 508 | 543 | 561 | 596 | 715 | 604 |
| NO: 26) | | | | | | | | | | | |
| AAVBba.38 | 265- | 328- | 383- | 453- | 469- | 492- | 531- | 549- | 584- | 707- | 449- |
| (SEQ ID | 271 | 333 | 387 | 464 | 480 | 508 | 543 | 561 | 596 | 715 | 604 |
| NO: 27) | | | | | | | | | | | |
| AAVBba.41 | 265- | 328- | 383- | 453- | 469- | 492- | 531- | 549- | 584- | 707- | 449- |
| (SEQ ID | 271 | 333 | 387 | 464 | 480 | 508 | 543 | 561 | 596 | 715 | 604 |
| NO: 28) | | | | | | | | | | | |
| AAVBba.42 | 265- | 328- | 383- | 453- | 469- | 492- | 531- | 549- | 584- | 707- | 449- |
| (SEQ ID | 271 | 333 | 387 | 464 | 480 | 508 | 543 | 561 | 596 | 715 | 604 |
| NO: 29) | | | | | | | | | | | |
| AAVBba.43 | 265- | 328- | 383- | 453- | 469- | 492- | 531- | 549- | 584- | 707- | 449- |
| (SEQ ID | 271 | 333 | 387 | 464 | 480 | 508 | 543 | 561 | 596 | 715 | 604 |
| NO: 30) | | | | | | | | | | | |
| AAVBba.44 | 265- | 328- | 383- | 453- | 469- | 492- | 531- | 549- | 584- | 707- | 449- |
| (SEQ ID | 271 | 333 | 387 | 464 | 480 | 508 | 543 | 561 | 596 | 715 | 604 |
| NO: 31) | | | | | | | | | | | |
| AAVBrh.26 | 262- | 327- | 382- | 452- | 465- | 488- | 527- | 545- | 581- | 704- | 448- |
| (SEQ ID | 270 | 332 | 386 | 460 | 476 | 505 | 539 | 558 | 593 | 712 | 601 |
| NO: 71) | | | | | | | | | | | |
| AAVBrh.27 | 262- | 327- | 382- | 452- | 465- | 488- | 527- | 545- | 581- | 704- | 448- |
| (SEQ ID | 270 | 332 | 386 | 460 | 476 | 505 | 539 | 558 | 593 | 712 | 601 |
| NO: 72) | | | | | | | | | | | |
| AAVBrh.28 | 262- | 327- | 382- | 452- | 465- | 488- | 527- | 545- | 581- | 704- | 448- |
| (SEQ ID | 270 | 332 | 386 | 460 | 476 | 505 | 539 | 558 | 593 | 712 | 601 |
| NO: 73) | | | | | | | | | | | |
| AAVBrh.29 | 262- | 327- | 382- | 452- | 465- | 488- | 527- | 545- | 581- | 704- | 448- |
| (SEQ ID | 270 | 332 | 386 | 460 | 476 | 505 | 539 | 558 | 593 | 712 | 601 |
| NO: 74) | | | | | | | | | | | |
| AAVBrh.30 | 262- | 327- | 382- | 452- | 465- | 488- | 527- | 545- | 581- | 704- | 448- |
| (SEQ ID | 270 | 332 | 386 | 460 | 476 | 505 | 539 | 558 | 593 | 712 | 601 |
| NO: 75) | | | | | | | | | | | |
| AAVBrh.31 | 262- | 327- | 382- | 452- | 465- | 488- | 527- | 545- | 581- | 704- | 448- |
| (SEQ ID | 270 | 332 | 386 | 460 | 476 | 505 | 539 | 558 | 593 | 712 | 601 |
| NO: 76) | | | | | | | | | | | |
| AAVBrh.32 | 262- | 327- | 382- | 452- | 465- | 488- | 527- | 545- | 581- | 704- | 448- |
| (SEQ ID | 270 | 332 | 386 | 460 | 476 | 505 | 539 | 558 | 593 | 712 | 601 |
| NO: 77) | | | | | | | | | | | |
| AAVBrh.33 | 262- | 327- | 382- | 452- | 465- | 488- | 527- | 545- | 581- | 704- | 448- |
| (SEQ ID | 270 | 332 | 386 | 460 | 476 | 505 | 539 | 558 | 593 | 712 | 601 |
| NO: 78) | | | | | | | | | | | |
| AAVBfm.17 | 262- | 327- | 382- | 452- | 466- | 489- | 528- | 546- | 582- | 705- | 448- |
| (SEQ ID | 270 | 332 | 386 | 461 | 477 | 506 | 540 | 559 | 594 | 713 | 602 |
| NO: 79) | | | | | | | | | | | |
| AAVBfm.18 | 262- | 327- | 382- | 452- | 466- | 489- | 528- | 546- | 582- | 705- | 448- |
| (SEQ ID | 270 | 332 | 386 | 461 | 477 | 506 | 540 | 559 | 594 | 713 | 602 |
| NO: 80) | | | | | | | | | | | |
| AAVBfm.20 | 262- | 327- | 382- | 452- | 466- | 489- | 528- | 546- | 582- | 705- | 448- |
| (SEQ ID | 270 | 332 | 386 | 461 | 477 | 506 | 540 | 559 | 594 | 713 | 602 |
| NO: 81) | | | | | | | | | | | |
| AAVBfm.21 | 262- | 327- | 382- | 452- | 466- | 489- | 528- | 546- | 582- | 705- | 448- |
| (SEQ ID | 270 | 332 | 386 | 461 | 477 | 506 | 540 | 559 | 594 | 713 | 602 |
| NO: 82) | | | | | | | | | | | |
| AAVBfm.24 | 262- | 327- | 382- | 452- | 466- | 489- | 528- | 546- | 582- | 705- | 448- |
| (SEQ ID | 270 | 332 | 386 | 461 | 477 | 506 | 540 | 559 | 594 | 713 | 602 |
| NO: 83) | , | | | | | | | | | | |
| AAVBfm.25 | 262- | 327- | 382- | 452- | 466- | 489- | 528- | 546- | 582- | 705- | 448- |
| (SEQ ID | 270 | 332 | 386 | 461 | 477 | 506 | 540 | 559 | 594 | 713 | 602 |
| NO: 84) | | | | | | | | | | | |
| AAVBfm.27 | 262- | 327- | 382- | 452- | 466- | 489- | 528- | 546- | 582- | 705- | 448- |
| (SEQ ID | 270 | 332 | 386 | 461 | 477 | 506 | 540 | 559 | 594 | 713 | 602 |
| NO: 85) | | | | | | | | | | | |
| AAVBfm.32 | 262- | 327- | 382- | 452- | 466- | 489- | 528- | 546- | 582- | 705- | 448- |
| (SEQ ID | 270 | 332 | 386 | 461 | 477 | 506 | 540 | 559 | 594 | 713 | 602 |
| NO: 86) | | | | | | | | | | | |
| AAVBfm.33 | 262- | 327- | 382- | 452- | 466- | 489- | 528- | 546- | 582- | 705- | 448- |
| (SEQ ID | 270 | 332 | 386 | 461 | 477 | 506 | 540 | 559 | 594 | 713 | 602 |
| NO: 87) | | | | | | | | | | | |
| AAVBfm.34 | 262- | 327- | 382- | 452- | 466- | 489- | 528- | 546- | 582- | 705- | 448- |
| (SEQ ID | 270 | 332 | 386 | 461 | 477 | 506 | 540 | 559 | 594 | 713 | 602 |
| NO: 88) | | | | | | | | | | | |
| AAVBfm.35 | 262- | 327- | 382- | 452- | 466- | 489- | 528- | 546- | 582- | 705- | 448- |
| (SEQ ID | 270 | 332 | 386 | 461 | 477 | 506 | 540 | 559 | 594 | 713 | 602 |
| NO: 89) | | | | | | | | | | | |
| AAVLK03 | 263- | 328- | 383- | 453- | 467- | 490- | 529- | 547- | 583- | 706- | 449- |
| (SEQ ID | 271 | 333 | 387 | 462 | 478 | 507 | 541 | 560 | 595 | 714 | 603 |
| NO: 173) | | | | | | | | | | | |

### Transgene

[0263] The transgene is a nucleic acid sequence, heterologous to the vector sequences flanking the transgene, which encodes a polypeptide, protein, or other product, of interest. The nucleic acid coding sequence is operatively linked to regulatory components in a manner which permits transgene transcription, translation, and/or expression in a host cell.

[0264] The composition of the transgene sequence will depend upon the use to which the resulting vector will be put. For example, one type of transgene sequence includes a reporter sequence, which upon expression produces a detectable signal. Such reporter sequences include, without limitation, DNA sequences encoding β-lactamase, β-galactosidase (LacZ), alkaline phosphatase, thymidine kinase, green fluorescent protein (GFP), chloramphenicol acetyltransferase (CAT), luciferase, membrane bound proteins including, for example, CD2, CD4, CD8, the influenza hemagglutinin protein, and others well known in the art, to which high affinity antibodies directed thereto exist or can be produced by conventional means, and fusion proteins comprising a membrane bound protein appropriately fused to an antigen tag domain from, among others, hemagglutinin or Myc.

[0265] These coding sequences, when associated with regulatory elements which drive their expression, provide signals detectable by conventional means, including enzymatic, radiographic, colorimetric, fluorescence or other spectrographic assays, fluorescent activating cell sorting assays and immunological assays, including enzyme linked immunosorbent assay (ELISA), radioimmunoassay (RIA) and immunohistochemistry. For example, where the marker sequence is the LacZ gene, the presence of the vector carrying the signal is detected by assays for beta-galactosidase activity. Where the transgene is green fluorescent protein or luciferase, the vector carrying the signal may be measured visually by color or light production in a luminometer.

[0266] However, desirably, the transgene is a non-marker sequence encoding a product which is useful in biology and medicine, such as proteins, peptides, RNA, enzymes, dominant negative mutants, or catalytic RNAs. Desirable RNA molecules include tRNA, dsRNA, ribosomal RNA, catalytic RNAs, siRNA, small hairpin RNA, trans-splicing RNA, and antisense RNAs. One example of a useful RNA sequence is a sequence which inhibits or extinguishes expression of a targeted nucleic acid sequence in the treated animal. Typically, suitable target sequences include oncologic targets and viral diseases. See, for examples of such targets the oncologic targets and viruses identified below in the section relating to immunogens.

[0267] The transgene may be used to correct or ameliorate gene deficiencies, which may include deficiencies in which normal genes are expressed at less than normal levels or deficiencies in which the functional gene product is not expressed. A preferred type of transgene sequence encodes a therapeutic protein or polypeptide which is expressed in a host cell. The disclosure further includes using multiple transgenes, e.g., to correct or ameliorate a gene defect caused by a multi-subunit protein. In certain situations, a different transgene may be used to encode each subunit of a protein, or to encode different peptides or proteins. This is desirable when the size of the DNA encoding the protein subunit is large, e.g., for an immunoglobulin, the platelet-derived growth factor, or a dystrophin protein. In order for the cell to produce the multi-subunit protein, a cell is infected with the recombinant virus containing each of the different subunits. Alternatively, different subunits of a protein may be encoded by the same transgene. In this case, a single transgene includes the DNA encoding each of the subunits, with the DNA for each subunit separated by an internal ribozyme entry site (IRES). This is desirable when the size of the DNA encoding each of the subunits is small, e.g., the total size of the DNA encoding the subunits and the IRES is less than five kilobases. As an alternative to an IRES, the DNA may be separated by sequences encoding a 2A peptide, which self-cleaves in a post-translational event. See, e.g., Donnelly et al, J. Gen. Virol., 78(Pt 1):13-21 (January 1997); Furler, et al, Gene Ther., 8(11):864-873 (June 2001); Klump et al., Gene Ther., 8(10):811-817 (May 2001). This 2A peptide is significantly smaller than an IRES, making it well suited for use when space is a limiting factor. More often, when the transgene is large, consists of multi-subunits, or two transgenes are co-delivered, rAAV carrying the desired transgene(s) or subunits are co-administered to allow them to concatamerize in vivo to form a single vector genome. In such an embodiment, a first AAV may carry an expression cassette which expresses a single transgene and a second AAV may carry an expression cassette which expresses a different transgene for co-expression in the host cell. However, the selected transgene may encode any biologically active product or other product, e.g., a product desirable for study.

[0268] Suitable transgenes may be readily selected by one of skill in the art. The selection of the transgene is not considered to be a limitation of this disclosure.

[0269] In some embodiments, the transgene is a heterologous protein, and this heterologous protein is a therapeutic protein. Exemplary therapeutic proteins include, but are not limited to, blood factors, such as β-globin, hemoglobin, tissue plasminogen activator, and coagulation factors; colony stimulating factors (CSF); interleukins, such as IL-1, IL-2, IL-3, IL-4, IL-5, IL-6, IL-7, IL-8, IL-9, etc.; growth factors, such as keratinocyte growth factor (KGF), stem cell factor (SCF), fibroblast growth factor (FGF, such as basic FGF and acidic FGF), hepatocyte growth factor (HGF), insulin-like growth factors (IGFs), bone morphogenetic protein (BMP), epidermal growth factor (EGF), growth differentiation factor-9 (GDF-9), hepatoma derived growth factor (HDGF), myostatin (GDF-8), nerve growth factor (NGF), neurotrophins, platelet-derived growth factor (PDGF), thrombopoietin (TPO), transforming growth factor alpha (TGF-α.), transforming growth factor beta (TGF-.β.), and the like; soluble receptors, such as soluble TNF-α. receptors, soluble VEGF receptors, soluble interleukin receptors (e.g., soluble IL-1 receptors and soluble type II IL-1 receptors), soluble .γ/δ T cell receptors, ligand-binding fragments of a soluble receptor, and the like; enzymes, such as α-glucosidase, imiglucarase, β-glucocerebrosidase, and alglucerase; enzyme activators, such as tissue plasminogen activator; chemokines, such as 1P-10, monokine induced by interferon-gamma (Mig), Groa/IL-8, RANTES, MIP-1α, MIP-1β., MCP-1, PF-4, and the like; angiogenic agents, such as vascular endothelial growth factors (VEGFs, e.g., VEGF121, VEGF165, VEGF-C, VEGF-2), glioma-derived growth factor, angiogenin, angiogenin-2; and the like; anti-angiogenic agents, such as a soluble VEGF receptor; protein vaccine; neuroactive peptides, such as nerve growth factor (NGF), bradykinin, cholecystokinin, gastin, secretin, oxytocin, gonadotropin-releasing hormone, beta-endorphin, enkephalin, substance P, somatostatin, prolactin, galanin, growth hormone-releasing hormone, bombesin, dynorphin, warfarin, neurotensin, motilin, thyrotropin, neuropeptide Y, luteinizing hormone, calcitonin, insulin, glucagons, vasopressin, angiotensin II, thyrotropin-releasing hormone, vasoactive intestinal peptide, a sleep peptide, and the like; thrombolytic agents; atrial natriuretic peptide; relaxin; glial fibrillary acidic protein; follicle stimulating hormone (FSH); human alpha-1 antitrypsin; leukemia inhibitory factor (LIF); tissue factors, luteinizing hormone; macrophage activating factors; tumor necrosis factor (TNF); neutrophil chemotactic factor (NCF); tissue inhibitors of metalloproteinases; vasoactive intestinal peptide; angiogenin; angiotropin; fibrin; hirudin; IL-1 receptor antagonists; and the like. Some other non-limiting examples of protein of interest include ciliary neurotrophic factor (CNTF); brain-derived neurotrophic factor (BDNF); neurotrophins 3 and 4/5 (NT-3 and 4/5); glial cell derived neurotrophic factor (GDNF); aromatic amino acid decarboxylase (AADC); hemophilia related clotting proteins, such as Factor VIII, Factor IX, Factor X; dystrophin, mini-dystrophin, or microdystrophin; lysosomal acid lipase; phenylalanine hydroxylase (PAH); glycogen storage disease-related enzymes, such as glucose-6-phosphatase, acid maltase, glycogen debranching enzyme, muscle glycogen phosphorylase, liver glycogen phosphorylase, muscle phosphofructokinase, phosphorylase kinase (e.g., PHKA2), glucose transporter (e.g., GLUT2), aldolase A, β-enolase, and glycogen synthase; lysosomal enzymes (e.g., beta-N-acetylhexosaminidase A); and any variants thereof.

[0270] In various embodiments, the heterologous protein is selected from the group consisting of Factor VIII, Factor IX, ATP7B protein, C1 esterase inhibitor (C1-INH), alpha 1 antitrypsin, and galactose-1-phosphate uridyl transferase (GALT), dystrophin, a mini-dystrophin, microdystrophin, phenylalanine hydroxylase (PAH), alpha-galactosidase A, and glucocerebrosidase.

### Regulatory Control Elements

[0271] The AAV vector also includes conventional control elements or sequences which are operably linked to the transgene in a manner which permits its transcription, translation and/or expression in a cell transfected with the plasmid vector or infected with the virus described herein. As used herein, “operably linked” sequences include both expression control sequences that are contiguous with the gene of interest and expression control sequences that act in trans or at a distance to control the gene of interest.

[0272] Expression control sequences include appropriate transcription initiation, termination, promoter and enhancer sequences; efficient RNA processing signals such as splicing and polyadenylation (polyA) signals; sequences that stabilize cytoplasmic mRNA; sequences that enhance translation efficiency (i.e., Kozak consensus sequence); sequences that enhance protein stability; and when desired, sequences that enhance secretion of the encoded product. A great number of expression control sequences, including promoters which are native, constitutive, inducible and/or tissue-specific, are known in the art and may be utilized.

[0273] Examples of constitutive promoters include, without limitation, the retroviral Rous sarcoma virus (RSV) LTR promoter (optionally with the RSV enhancer), the cytomegalovirus (CMV) promoter (optionally with the CMV enhancer) (see, e.g., Boshart et al, Cell, 41:521-530 (1985)), the SV40 promoter, the dihydrofolate reductase promoter, the β-actin promoter, the phosphoglycerol kinase (PGK) promoter, and the EF1 promoter [Invitrogen]. Inducible promoters allow regulation of gene expression and can be regulated by exogenously supplied compounds, environmental factors such as temperature, or the presence of a specific physiological state, e.g., acute phase, a particular differentiation state of the cell, or in replicating cells only. Inducible promoters and inducible systems are available from a variety of commercial sources, including, without limitation, Invitrogen, Clontech and Ariad. Many other systems have been described and can be readily selected by one of skill in the art. Examples of inducible promoters regulated by exogenously supplied compounds, include, the zinc-inducible sheep metallothionine (MT) promoter, the dexamethasone (Dex)-inducible mouse mammary tumor virus (MMTV) promoter, the T7 polymerase promoter system [WO 98/10088]; the ecdysone insect promoter [No et al, Proc. Natl. Acad. Sci. USA, 93:3346-3351 (1996)], the tetracycline-repressible system [Gossen et al, Proc. Natl. Acad. Sci. USA, 89:5547-5551 (1992)], the tetracycline-inducible system [Gossen et al, Science, 268:1766-1769 (1995), see also Harvey et al, Curr. Opin. Chem. Biol., 2:512-518 (1998)], the RU486-inducible system [Wang et al, Nat. Biotech., 15:239-243 (1997) and Wang et al, Gene Ther., 4:432-441 (1997)] and the rapamycin-inducible system [Magari et al, J. Clin. Invest., 100:2865-2872 (1997)]. Other types of inducible promoters which may be useful in this context are those which are regulated by a specific physiological state, e.g., temperature, acute phase, a particular differentiation state of the cell, or in replicating cells only.

[0274] In another embodiment, the native promoter for the transgene is used. The native promoter may be preferred when it is desired that expression of the transgene should mimic the native expression. The native promoter may be used when expression of the transgene must be regulated temporally or developmentally, or in a tissue-specific manner, or in response to specific transcriptional stimuli. In a further embodiment, other native expression control elements, such as enhancer elements, polyadenylation sites or Kozak consensus sequences may also be used to mimic the native expression.

[0275] Another embodiment of the transgene includes a gene operably linked to a tissue-specific promoter. For instance, if expression in skeletal muscle is desired, a promoter active in muscle should be used. These include the promoters from genes encoding skeletal β-actin, myosin light chain 2A, dystrophin, muscle creatine kinase, as well as synthetic muscle promoters with activities higher than naturally-occurring promoters (see Li et al., Nat. Biotech., 17:241-245 (1999)). Examples of promoters that are tissue-specific are known for liver (albumin, Miyatake et al., J. Virol., 71:5124-32 (1997); hepatitis B virus core promoter, Sandig et al., Gene Ther., 3:1002-9 (1996); alpha-fetoprotein (AFP), Arbuthnot et al., Hum. Gene Ther., 7:1503-14 (1996)), bone osteocalcin (Stein et al., Mol. Biol. Rep., 24:185-96 (1997)); bone sialoprotein (Chen et al., J. Bone Miner. Res., 11:654-64 (1996)), lymphocytes (CD2, Hansal et al., J. Immunol., 161:1063-8 (1998); immunoglobulin heavy chain; T cell receptor chain), neuronal such as neuron-specific enolase (NSE) promoter (Andersen et al., Cell. Mol. Neurobiol., 13:503-15 (1993)), neurofilament light-chain gene (Piccioli et al., Proc. Natl. Acad. Sci. USA, 88:5611-5 (1991)), and the neuron-specific vgf gene (Piccioli et al., Neuron, 15:373-84 (1995)), among others.

[0276] Optionally, plasmids carrying therapeutically useful transgenes may also include selectable markers or reporter genes may include sequences encoding geneticin, hygromicin or purimycin resistance, among others. Such selectable reporters or marker genes (preferably located outside the viral genome to be rescued by the method of production) can be used to signal the presence of the plasmids in bacterial cells, such as ampicillin resistance. Other components of the plasmid may include an origin of replication. Selection of these and other promoters and vector elements are conventional and many such sequences are available [see, e.g., Sambrook et al, and references cited therein].

### Methods for Producing Recombinant AAVs

[0277] The present disclosure provides materials and methods for producing recombinant AAVs in insect or mammalian cells. In some embodiments, the viral construct further comprises a promoter and a restriction site downstream of the promoter to allow insertion of a polynucleotide encoding one or more proteins of interest, wherein the promoter and the restriction site are located downstream of the 5′ AAV ITR and upstream of the 3′ AAV ITR. In some embodiments, the viral construct further comprises a posttranscriptional regulatory element downstream of the restriction site and upstream of the 3′ AAV ITR. In some embodiments, the viral construct further comprises a polynucleotide inserted at the restriction site and operably linked with the promoter, where the polynucleotide comprises the coding region of a protein of interest. As a skilled artisan will appreciate, any one of the AAV vector disclosed in the present application can be used in the method as the viral construct to produce the recombinant AAV.

[0278] In some embodiments, the helper functions are provided by one or more helper plasmids or helper viruses comprising adenoviral or baculoviral helper genes. Non-limiting examples of the adenoviral or baculoviral helper genes include, but are not limited to, E1A, E1B, E2A, E4 and VA, which can provide helper functions to AAV packaging.

[0279] Helper viruses of AAV are known in the art and include, for example, viruses from the family Adenoviridae and the family Herpesviridae. Examples of helper viruses of AAV include, but are not limited to, SAdV-13 helper virus and SAdV-13-like helper virus described in US Publication No. 20110201088 (the disclosure of which is incorporated herein by reference), helper vectors pHELP (Applied Viromics). A skilled artisan will appreciate that any helper virus or helper plasmid of AAV that can provide adequate helper function to AAV can be used herein.

[0280] In some embodiments, the AAV cap genes are present in a plasmid. The plasmid can further comprise an AAV rep gene. The cap genes and/or rep gene from any AAV serotype (including, but not limited to, AAV1, AAV2, AAV4, AAV3, AAV5, AAV6, AAV7, AAV8, AAV9, AAV10, AAV11, AAV12, AAV13, AAV3b, LK03, rh74.j, rh10, bovine, AAVGoat, Bba.41, Bba.47, Bba.49, Bba.33, Bba.45, Bba.46, Bba.50, Bba.51, RN35, Anc110_9 VR, AAV_go.1, AAVs listed in Table 4, AAV listed in Table 5, and/or variants thereof.) can be used herein to produce the recombinant AAV. In some embodiments, the AAV cap genes encode a capsid from serotype 1, serotype 2, serotype 4, serotype 5, serotype 6, serotype 7, serotype 8, serotype 9, serotype 10, serotype 11, serotype 12, serotype 13 or a variant thereof.

[0281] In some embodiments, the insect or mammalian cell can be transfected with the helper plasmid or helper virus, the viral construct and the plasmid encoding the AAV cap genes; and the recombinant AAV virus can be collected at various time points after co-transfection. For example, the recombinant AAV virus can be collected at about 12 hours, about 24 hours, about 36 hours, about 48 hours, about 72 hours, about 96 hours, about 120 hours, or a time between any of these two time points after the co-transfection.

[0282] Recombinant AAV can also be produced using any conventional methods known in the art suitable for producing infectious recombinant AAV. In some instances, a recombinant AAV can be produced by using an insect or mammalian cell that stably expresses some of the necessary components for AAV particle production. For example, a plasmid (or multiple plasmids) comprising AAV rep and cap genes, and a selectable marker, such as a neomycin resistance gene, can be integrated into the genome of the cell. The insect or mammalian cell can then be co-infected with a helper virus (e.g., adenovirus or baculovirus providing the helper functions) and the viral vector comprising the 5′ and 3′ AAV ITR (and the nucleotide sequence encoding the heterologous protein, if desired). The advantages of this method are that the cells are selectable and are suitable for large-scale production of the recombinant AAV. As another non-limiting example, adenovirus or baculovirus rather than plasmids can be used to introduce rep and cap genes into packaging cells. As yet another non-limiting example, both the viral vector containing the 5′ and 3′ AAV LTRs and the rep-cap genes can be stably integrated into the DNA of producer cells, and the helper functions can be provided by a wild-type adenovirus to produce the recombinant AAV.

### Cell Types Used in AAV Production

[0283] The viral particles comprising the AAV vectors described herein may be produced using any invertebrate cell type which allows for production of AAV or biologic products and which can be maintained in culture. For example, the insect cell line used can be from Spodoptera frugiperda, such as Sf9, SF21, SF900+, drosophila cell lines, mosquito cell lines, e.g., Aedes albopictus derived cell lines, domestic silkworm cell lines, e.g. Bombyxmori cell lines, Trichoplusia ni cell lines such as High Five cells or Lepidoptera cell lines such as Ascalapha odorata cell lines. Preferred insect cells are cells from the insect species which are susceptible to baculovirus infection, including High Five, Sf9, Se301, SelZD2109, SeUCR1, Sf900+, Sf21, BTI-TN-5B1-4, MG-1, Tn368, HzAm1, BM-N, Ha2302, Hz2E5 and Ao38.

[0284] Baculoviruses are enveloped DNA viruses of arthropods, two members of which are well known expression vectors for producing recombinant proteins in cell cultures. Baculoviruses have circular double-stranded genomes (80-200 kbp) which can be engineered to allow the delivery of large genomic content to specific cells. The viruses used as a vector are generally Autographa californica multicapsid nucleopolyhedrovirus (AcMNPV) or Bombyx mori (Bm-NPV) (Kato et al., 2010).

[0285] Baculoviruses are commonly used for the infection of insect cells for the expression of recombinant proteins. In particular, expression of heterologous genes in insects can be accomplished as described in for instance U.S. Pat. No. 4,745,051; Friesen et al (1986); EP 127,839; EP 155,476; Vlak et al (1988); Miller et al (1988); Carbonell et al (1988); Maeda et al (1985); Lebacq-Verheyden et al (1988); Smith et al (1985); Miyajima et al (1987); and Martin et al (1988). Numerous baculovirus strains and variants and corresponding permissive insect host cells that can be used for protein production are described in Luckow et al (1988), Miller et al (1986); Maeda et al (1985) and McKenna (1989).

[0286] In another aspect of the disclosure, the methods are also carried out with any mammalian cell type which allows for replication of AAV or production of biologic products, and which can be maintained in culture. Preferred mammalian cells used can be HEK293, HeLa, CHO, NS0, SP2/0, PER.C6, Vero, RD, BHK, HT 1080, A549, Cos-7, ARPE-19 and MRC-5 cells.

### Production of Heterologous Proteins In Vitro

[0287] As a non-limiting example, the recombinant AAV disclosed herein can be used to produce a protein of interest in vitro, for example, in a cell culture. As one non-limiting example, in some embodiments, a method for producing a protein of interest in vitro, where the method includes providing a recombinant AAV comprising a nucleotide sequence encoding the heterologous protein; and contacting the recombinant AAV with a cell in a cell culture, whereby the recombinant AAV expresses the protein of interest in the cell. The size of the nucleotide sequence encoding the protein of interest can vary. For example, the nucleotide sequence can be at least about 1.4 kb, at least about 1.5 kb, at least about 1.6 kb, at least about 1.7 kb, at least about 1.8 kb, at least about 2.0 kb, at least about 2.2 kb, at least about 2.4 kb, at least about 2.6 kb, at least about 2.8 kb, at least about 3.0 kb, at least about 3.2 kb, at least about 3.4 kb, at least about 3.5 kb in length, at least about 4.0 kb in length, at least about 5.0 kb in length, at least about 6.0 kb in length, at least about 7.0 kb in length, at least about 8.0 kb in length, at least about 9.0 kb in length, or at least about 10.0 kb in length.

### Production of Heterologous Proteins In Vivo

[0288] The recombinant AAV disclosed herein can be used to produce a protein of interest in vivo, for example in an animal such as a mammal. Some embodiments provide a method for producing a protein of interest in vivo, where the method includes providing a recombinant AAV comprising a nucleotide sequence encoding the protein of interest; and administering the recombinant AAV to the subject, whereby the recombinant AAV expresses the protein of interest in the subject. The subject can be, in some embodiments, a non-human mammal, for example, a monkey, a dog, a cat, a mouse, or a cow. The size of the nucleotide sequence encoding the protein of interest can vary. For example, the nucleotide sequence can be at least about 1.4 kb, at least about 1.5 kb, at least about 1.6 kb, at least about 1.7 kb, at least about 1.8 kb, at least about 2.0 kb, at least about 2.2 kb, at least about 2.4 kb, at least about 2.6 kb, at least about 2.8 kb, at least about 3.0 kb, at least about 3.2 kb, at least about 3.4 kb, at least about 3.5 kb in length, at least about 4.0 kb in length, at least about 5.0 kb in length, at least about 6.0 kb in length, at least about 7.0 kb in length, at least about 8.0 kb in length, at least about 9.0 kb in length, or at least about 10.0 kb in length.

### Therapeutic Uses

[0289] The recombinant AAV produced by the methods described herein can be used to express one or more therapeutic proteins to treat various diseases or disorders. Non-limiting examples of the diseases include cancer such as carcinoma, sarcoma, leukemia, or lymphoma. Additional diseases that can be treated using the AAV vectors, recombinant viruses and methods disclosed herein include genetic disorders including sickle cell anemia, cystic fibrosis, lysosomal acid lipase (LAL) deficiency 1, Tay-Sachs disease, Phenylketonuria, Mucopolysaccharidoses, Glycogen storage diseases (GSD, e.g., GSD types I, II, III, IV, V, VI, VII, VIII, IX, X, XI, XII, XIII, and XIV), Galactosemia, muscular dystrophies (e.g., Duchenne muscular dystrophy), hemophilia such as hemophilia A (classic hemophilia) and hemophilia B (Christmas Disease), Wilson's disease, hereditary angioedema (HAE), alpha 1 antitrypsin deficiency, phenylketonuria (PKU), Fabry Disease, and Gaucher Disease.

[0290] In various embodiments, the disorder or disease is selected from the group consisting of hemophilia A, hemophilia B, Wilson's disease, hereditary angioedema (HAE), alpha 1 antitrypsin deficiency, galactosemia, Duchenne's Muscular Dystrophy or other muscular dystrophies, phenylketonuria (PKU), Fabry Disease, and Gaucher Disease. Additional disorders or diseases contemplated herein include those that can be treated either by local expression in the liver or in muscle, or by expression of secreted protein from the liver (or muscle). The amount of the heterologous protein expressed in the subject (e.g., the serum of the subject) can vary. For example, in some embodiments the protein can be expressed in the serum of the subject in the amount of at least about 9 μg/ml, at least about 10 μg/ml, at least about 50 μg/ml, at least about 100 μg/ml, at least about 200 μg/ml, at least about 300 μg/ml, at least about 400 μg/ml, at least about 500 μg/ml, at least about 600 μg/ml, at least about 700 μg/ml, at least about 800 μg/ml, at least about 900 μg/ml, or at least about 1000 μg/ml. In some embodiments, the protein of interest is expressed in the serum of the subject in the amount of about 9 μg/ml, about 10 μg/ml, about 50 μg/ml, about 100 μg/ml, about 200 μg/ml, about 300 μg/ml, about 400 μg/ml, about 500 μg/ml, about 600 μg/ml, about 700 μg/ml, about 800 μg/ml, about 900 μg/ml, about 1000 μg/ml, about 1500 μg/ml, about 2000 μg/ml, about 2500 μg/ml, or a range between any two of these values. A skilled artisan will understand that the expression level in which a protein of interest is needed for the method to be effective can vary depending on non-limiting factors such as the particular protein of interest and the subject receiving the treatment, and an effective amount of the protein can be readily determined by a skilled artisan using conventional methods known in the art without undue experimentation.

[0291] Contemplated herein is a method of treating a subject having a disease or disorder as described herein with multiple doses of a recombinant adeno-associated virus (rAAV) vector, the method comprising: administering to a subject a first rAAV vector comprising a transgene and a first capsid protein, and administering to a subject a second rAAV vector with a second capsid protein comprising the same transgene as the first gene therapy vector.

[0292] In addition, comtemplated herein is a first rAAV vector for use in a method of treating a subject with multiple doses of rAAV vector, wherein the method comprises: (a) administering to the subject the first rAAV vector, wherein the first rAAV vector comprises a transgene comprising a therapeutic molecule and a first capsid, and (b) administering to the subject a second rAAV vector, wherein the second rAAV vector comprises a transgene and a second capsid, wherein the transgene in the second rAAV vector comprises the same therapeutic molecule or a different therapeutic molecule as the transgene in the first rAAV vector.

[0293] Also contemplated herein is a first rAAV vector for use in a method of treating a disease or disorder in a subject in need thereof with multiple doses of rAAV vector, the method comprising: (a) administering to the subject the first rAAV vector comprising a transgene comprising a therapeutic molecule useful for treating the disease or disorder and a first capsid, and (b) administering to a subject a second rAAV vector comprising a transgene comprising a therapeutic molecule useful for treating the disease or disorder and a second capsid, wherein the transgene in the second rAAV vector comprises the same therapeutic molecule or a different therapeutic molecule useful to treat the disease or disorder as the transgene in the first rAAV vector.

[0294] In addition, comtemplated herein is a first rAAV vector for use in a gene therapy method which involves the administration of multiple doses of rAAV vector, wherein the method comprises: (a) administering to a subject the first rAAV vector, wherein the first rAAV vector comprises a transgene comprising a therapeutic molecule and a first capsid, and (b) administering to the subject a second rAAV vector, wherein the second rAAV vector comprises a transgene and a second capsid, wherein the transgene in the second rAAV vector comprises the same therapeutic molecule or a different therapeutic molecule.

[0295] Also contemplated herein is a a first rAAV vector for use in a gene therapy method which involves the administration of multiple doses of rAAV vector, the method comprising: (a) administering to a subject in need thereof the first rAAV vector comprising a transgene comprising a therapeutic molecule useful for treating the disease or disorder and a first capsid, and (b) administering to the subject a second rAAV vector comprising a transgene comprising a therapeutic molecule useful for treating the disease or disorder and a second capsid, wherein the transgene in the second rAAV vector comprises the same therapeutic molecule or a different therapeutic molecule useful to treat the disease or disorder as the transgene in the first rAAV vector.

[0296] It is further contemplated that the first and second capsid proteins are phylogenetically distinct capsid proteins. It is contemplated that the second or subsequent AAV comprises a capsid having sufficient phylogenetic distance between the viruses that there is not significant cross-reactivity of preexisting immunogenicity in the subject against the second capsid protein. In various embodiments, the first capsid protein is selected from the group consisting of AAV1, AAV2, AAV4, AAV3, AAV5, AAV6, AAV7, AAV8, AAV9, AAV10, AAV11, AAV12, AAV13, AAV3b, LK03, rh74.j, rh10, bovine, AAVGoat, Bba.41, Bba.47, Bba.49, Bba.33, Bba.45, Bba.46, Bba.50, Bba.51, RN35, Anc110_9 VR, AAV_go.1, AAVs listed in Table 4, AAV listed in Table 5, and/or variants thereof. In various embodiments, the second capsid protein is selected from the group consisting of AAV1, AAV2, AAV4, AAV3, AAV5, AAV6, AAV7, AAV8, AAV9, AAV10, AAV11, AAV12, AAV13, AAV3b, LK03, rh74.j, rh10, bovine, AAVGoat, Bba.41, Bba.47, Bba.49, Bba.33, Bba.45, Bba.46, Bba.50, Bba.51, RN35, Anc110_9 VR, AAV_go.1, AAVs listed in Table 4, AAV listed in Table 5, and/or variants thereof.

[0297] In some embodiments, the first rAAV vector, the second rAAV vector or both are administered to a subject at a dose of from about 1×10⁹ vg/kg to about 1×10¹⁵ vg/kg of body weight. In certain embodiments, the first rAAV vector, the second rAAV vector or both are administered to a subject at a dose of from about 1×10¹² vg/kg to about 1×10¹⁵ vg/kg of body weight.

[0298] In various embodiments, the subject is administered an immunosuppressant, prior to or subsequent to administration of the second gene therapy vector. In various embodiments, the immunosuppressant is selected from the group consisting of T cell inhibitors, calcineurin inhibitors, mTOR inhibitor and steroids. In various embodiments, the immunosuppressant is anti-thymocyte globulin (ATG), tacrolimus, cyclosporine, mycophenolate mofetil, mycophenolate sodium, azathioprine, sirolimus (rapamycin), or prednisone. In various embodiments, the immunosuppressant is delivered via a delivery vehicle, such as a liposome or nanoparticle.

[0299] In various embodiments, the subject is administered intravenous immunoglobulins (IVIG) prior to or subsequent to administration of the second gene therapy vector.

[0300] In various embodiments, the second gene therapy vector is administered 6 months, 1 year, 1.5 year, 2 years, 2.5 years, 3 years, 4 years, 5 years or 6 years or more after the first administration of a gene therapy vector.

[0301] In various embodiments, the gene therapy is administered intravenously or subcutaneously.

### Kits

[0302] Contemplated herein is a pharmaceutical kit comprising a first rAAV vector, in a first container; and a second rAAV vector, in a second container, wherein the first rAAV vector comprises a transgene comprising a therapeutic molecule and a first capsid and the second rAAV vector comprises a transgene comprising a therapeutic molecule and a second capsid, wherein the transgene in the second rAAV vector comprises the same or different therapeutic molecule as the transgene in the first rAAV vector. In a specific embodiments, the first capsid is phylogenetically distinct from the second capsid of the second rAAV vector. In certain embodiments, the concentration of the first rAAV in the first container is from about 1×10¹² vg/mL to about 1×10¹⁵ vg/mL. In certain embodiments, the concentration of the second rAAV located in the second container is from about 1×10¹² vg/mL to about 1×10¹⁵ vg/mL. In certain embodiments, the kit comprises instructions for using the kit in a method for the treatment of a disease or disorder in a subject in need thereof, or in a gene therapy method involving multiple administrations of AAV. In certain embodiments, the instructions comprise administration methods. In certain embodiments, the instructions comprise dosing methods. In certain embodiments, the dosing methods comprise timing for dosing a subject with the first rAAV vector, the second rAAV vector, or both.

[0303] The following Examples are meant to be illustrative rather than limiting.

### Example 1: Analysis of AAV Capsid Pre-Existing Immunity

[0304] One side-effect of gene therapy administration can be the immune response generated against the viral capsid proteins in the gene therapy vector. In addition, humans may have been exposed to AAV and exhibit pre-existing immunity to some capsids that may limit the transduction by the vector. However, some gene therapy vectors may exhibit lower pre-existing immunity compared to other gene therapy vectors. For example, Liu et al. (Gene Ther. 21(8):732-8, 2014) previously described that pre-existing immunity to AAV5 was lower in healthy Chinese populations compared to AAV2 or AAV8. A low-preexisting immunity to the viral vector may be helpful and preferable when determining whether a gene therapy vector can be administered or redosed to a subject without eliciting an immune cascade that limits the efficacy of the vector and reduces the amount of transgene expressed to the subject.

[0305] In order to determine which AAV vectors may have the lowest pre-existing immunity, neutralization assays were conducted to determine the amount of transduction inhibition activity to various capsids in average human serum. IVIG, which is IgG pooled from 5000 individuals, is used to evaluate the average pre-existing immunity in human serum. Briefly, 293T cells were uniformly seeded in 96 well, opaque white plates at 4×10⁴ cells/well 20 hours prior to vector addition. Dilutions of 100 mg/mL IVIG (Gammagard) prepared by 2-fold serial dilution into DMEM+1% BSA, from 20 mg/mL to 0.04 mg/mL and a 0 mg/mL control. Vector solutions prepared by dilution of vector stock to 4×10⁹ vg/mL in DMEM+1% BSA+100 uM Etoposide. All vectors were packaged with the same RSV-Firefly Luciferase reporter, purified by double-CsCl gradient and vg/mL quantified by qPCR titer. Consistent total capsid protein was assessed by silver stain gel. IVIG dilutions and vector solutions were mixed 1:1 and incubated at 37° C. for 1 hour. 20 ul/well from the mix plate was subsequently added to the corresponding well in a previously prepared cell plate, in duplicate. Cell plates were incubated at 37° C. for 72 hours. Firefly luciferase expression was quantified by RLU after substrate addition and cell lysis and viewed as relative expression to the 0 mg/mL IVIG control. Neutralizing titers (NC50) were calculated by the concentration of IVIG that results in 50% gene transduction of the cells. Neutralizing titers from serum and plasma from mice, NHPs and humans were generated using minor variations of this general protocol.

[0306] FIG. 1 illustrates the pre-existing immunity to various gene therapy vectors comprising AAV capsids described herein and known in the literature. FIG. 1 shows that human IVIG contains less neutralizing antibodies to bovine, Bba.49, AAV5 and Bba.47 than to the other AAVs.

[0307] FIG. 2 shows that humans have lower pre-existing immunity to Bba.33 vector compared to AAV2, AAV8 and AAV5. Similarly, FIG. 3 shows that humans also have lower pre-existing immunity to AAV12-like variants Bba.45, Bba.45, Bba.46, Bba.47, Bba.49, Bba.50, and Bba.51 compared to AAV5, AAV8 and AAV9.

[0308] FIG. 4 shows titers of pre-existing neutralizing antibodies to different AAV vectors in individual human donors. The heat map is shaded by titer as described in the legend at the right. The higher the titer, the darker the shading. FIG. 4 demonstrates that humans have pre-existing NAb titers to multiple capsids, and the specificity of those titers closely follows AAV VP3 phylogeny. For example, if a human subject has a pre-existing NAb titer to AAV5 or AAV12, the data suggest they will also have a NAb titer to the common NHP/Human AAV isolates. AAV12-specific antibody titers were generally similar to or lower than AAV5 in all of the 50 human samples tested.

### Example 2: Cross-Reactivity of Capsid Proteins In Vivo

[0309] In order to determine if redosing with a second gene therapy vector comprising a different AAV capsid would be possible, cross reactivity to a second vector was evaluated in subjects who have received a first AAV vector expressing a transgene. Pre-existing NAb screening in Non-Human Primates (NHPs) have shown low AAV5 seropositivity but high titers for other “primate capsids”. FIG. 5 shows the results of assays for pre-existing NAb titers for AAV9, AAV12 and other capsids. All animals were dosed with 6×10¹³ vg/kg AAV5-FVIII and examined over 8 weeks for plasma expression of hFVIII protein.

[0310] In a further experiment, NHPs with or without pre-existing immunity to AAV5, that received AAV5-FVIII, were assayed for cross-reacting neutralizing antibodies to Bba.49, pre and post AAV5-FVIII dose. NHPs were evaluated for pre-existing antibodies to AAV5 using a total antibody assay (TAb) and inhibitors of transduction were determined using a cell-based in vitro TI assay as previously described. (see e.g. Falese L et al. (2017) Gene Therapy; Sandberg H et al. (2001) Thromb Haemost; 85(1): 93-100). Total binding antibody (TAb) against AAV5 were detected in plasma using a sandwich electrochemiluminescence assay (ECLA) on the MSDTM platform. The cell based transduction inhibition assay tests ability of plasma to block the in vitro transduction of HEK293T/17 cells by a AAV5-CMV-GFP vector.

[0311] FIG. 6 shows neutralizing antibody titers to Bba.49 in all dosed NHPs, pre AAV5 dose (−2 weeks) and at 2 weeks post AAV5 dose and 7 weeks post AAV5 dose. Pre-existing neutralizing antibody titer to Bba.49 did not significantly affect the cross-reactive titer to Bba.49 post the AAV5 dose.

[0312] FIG. 7 shows levels of antibody titers to AAV5 at −2 weeks (pre-dose and at 2 weeks post AAV5 dose and 7 weeks post AAV5 dose in NHPs with varying levels of pre-existing neutralizing antibodies to AAV5. As expected, all animals dosed with AAV5 vector produced a robust and sustained anti-AAV5 humoral response, whether or not they had a pre-existing anti-AAV5 titer.

[0313] In 9/15 animals, the administration of AAV5 vector did not significantly alter the neutralizing titer to Bba49. 6/15 animals had a pre-existing titer of <20 and none of those showed a significant increase in titer. 9/15 animals had a pre-existing titer >20 and 5 of those animals showed only a modest increase in titer at either 2 or 7 wks post-AAV5 dose. These increases (10 fold) are small relative to the specific anti-AAV5 titers generated from the AAV5 vector, seen in FIG. 7. It is possible the few measured increases in Bba49 neutralizing titers could be due to an indirect boosting of pre-existing Ig levels and/or an antibody affinity maturation process that is inherently broad, both are likely transient and unlikely relevant for clinical redosing applications. That does not preclude the possibility of shared neutralizing epitopes between AAV5 and Bba49, but most of the neutralizing activity generated from the AAV5 vector was conclusively not shared. The lack of any Bba49 cross-reactive neutralizing titers generated post-AAV5 dosing in animals with low pre-existing anti-Bba49 titers and the modest increase in a few animals with elevated pre-existing anti-Bba49 titers supports the conclusion of limited humoral cross-reactivity between AAV5 and Bba49.

[0314] Pre-existing neutralizing antibodies to AAV9, RN35 and Bba.41 were evaluated in NHPs. NHPs have high sero-prevalence for both AAV9 and Bba.41, although some NHP samples showed pre-existing titers specific for one or the other capsid (FIG. 8), suggesting that AAV9 and Bba.41 may be serologically distinct. Neutralizing activity to Bba.41 was tested in NHPs previously dosed with AAV9, RN35 or Bba.41. In NHPs with no pre-existing titers, neutralizing activity shows specificity to the AAV dosed. Only NHPs dosed with Bba.41 showed neutralizing antibodies to Bba.41 (FIG. 9). Cross-reactivity is demonstrated for highly similar capsid proteins (FIG. 10). For example, AAV9 and RN35 have highly similar capsid protein sequences (92.9% sequence ID; RN35 was designed to mimic the capsid surface of AAV9). NHPs dosed with AAV9 show cross-reactivity to RN35 as expected. NHPs dosed with AAV9, which has less sequence identity to Bba.41, show limited cross-reactivity to Bba.41. These results suggest that captive NHPs seem to have more specific pre-existing NAb titers, hypothetically due to more isolated/acute exposures to AAV.

[0315] Neutralizing titers to Bba.49 were measured in human patients receiving AAV5-FVIII therapy at 6×10¹² vg/kg, 2×10¹³ vg/kg, 4×10¹³ vg/kg or 6×10¹³ vg/kg (FIG. 11). Serum samples from human subjects receiving AAV5-FVIII therapy during a clinical trial obtained 1.5 to 2.5 years after initial dosing were assayed for inhibition of transduction by Bba.49 in vitro. The neutralizing titer in IVIG represents the average titer in human serum as negative control for comparison. Overall low NAb titers to Bba.49 post-AAV5 dose indicate limited cross-neutralizing activity. One patient had an elevated titer but it is unknown if the titer was pre-existing or caused by AAV5 dose.

[0316] Additional cross-reactivity to different capsids (AAV5, AAV2, AAV6, AAV8 and AAVrh10) was measured in human patients receiving AAV5-FVIII therapy at either 4×10¹³ vg/kg (FIGS. 13A-E) or 6×10¹³ vg/kg (FIGS. 12A-E), pre-dose and at 8 weeks and 1.5-2 yrs post dose. Following dosing, AAV5 antibody titers rise into the tens/hundreds of thousands by week 8 and elevate to millions by 1.5-2.5 years post dose in humans. Antibodies against other capsids are generally at “pre-existing” titer levels 1.5-2.5 yrs post-dose (FIGS. 12A-E-13A-E). However, one patient in the 4×10¹³ vg/kg group had pre-existing titers to both AAV2 and AAV6 and exhibited anti-AAV2 and AAV6 titers well above their pre-existing TAb+ levels (FIGS. 13B-C).

### Example 3-Dual Dosing/Redosing Experiments In Vivo

[0317] In order to determine the feasibility of redosing of animals with a different AAV gene therapy vector, experiments in mice were undertaken.

[0318] Wild type male mice (C57BL/6J, Jackson Laboratories #000664), 8-10 weeks old, were injected intravenously with 6×10¹³ vg/kg (4 ul/gm) of a luciferase (LUC) gene, contained in either AAV5 or AAV9 serotype capsids. Four weeks following this administration, the mice treated with AAV5-luciferase were injected intravenously with 6×10¹³ vg/kg of β-chain of chorionic gonadotropin (βCG) gene contained in either an AAV5, Bba.47 or Bba.49 capsid (4 ul/gm). Mice treated initially with AAV9-luciferase were injected with 6×10¹³ vg/kg (4 ul/gm) β-CG gene in either an AAV9 or Bba.41 capsid.

[0319] Lysates and serum samples were suspended in buffer containing 8M urea and a stable isotope peptide of L*LEPADNPFLPQ (SEQ ID NO: 172) (Pepscan) Samples where then reduced with dithiothreitol (DTT) (Sigma), alkylated with iodoacetamide (IAA) (VWR) and digested with Trypsin/Lys-C (Promega) overnight at 37° C. Digestion was quenched with 10% formic acid. Digested samples were cleaned up using Waters Sep-Pak C18 SPE plate on a Waters positive pressure manifold. Eluted samples were dried using a Rotovap (Thermo) and resuspended in 0.1% formic acid in water prior to injection on a Waters H-Class UPLC connected to a 6500 AB Sciex. Peak integration was performed using Sciex MultiQuant software.

[0320] Blood samples were collected just prior to study start and every 2 weeks during the experiment by making a transverse nick across one of the lateral veins of the tail, approximately 0.1 cm in length, using a sterile surgical blade. This yielded a blood sample of approximately 100 uL which was collected and centrifuged (5000 rpm for 10 minutes at 4° C.) to yield serum. Serum was decanted into 1.5 mL eppendorf tubes, stored at −80° C., and transferred for analysis of βCG expression and in vitro transduction inhibition. Animals were killed 12 weeks after the initial AAV5-luciferase or AAV9-luciferase administration, and liver, heart, and gastrocnemius were collected and stored for possible future analysis.

[0321] FIG. 15A shows that AAV5-βCG dosed 4 weeks after AAV5-LUC does not produce any measurable βCG in serum at 6 weeks or 8 weeks post administration. In contrast, Bba.47-βCG and Bba.49-βCG, dosed 4 weeks after AAV5-LUC produced equivalent βCG serum expression to mice that were predosed with vehicle alone. Similarly, FIG. 15B shows AAV9-βCG dosed after vehicle produced βCG expression in serum, while AAV9-βCG, dosed after AAV9-LUC did not. In contrast, Bba.41βCG produced βCG expression when predosed with vehicle or AAV9-LUC.

[0322] In summary, these studies would suggest that Bba.47 and Bba.49 can be dosed in animals after AAV5 treatment without any considerable neutralizing effects. Similarly, Bba.41-βCG can be dosed after AAV9-LUC without any considerable loss in βCG expression.

TABLE 6
(VP1 sequences (amino acid sequences and representative nucleic acid-
encoding sequences)

| SEQ ID | | |
|---|---|---|
| NO. | AAV | Sequence |
| 1 | AAVbo | MSFVDHPPDWLESIGDGFREFLGLEAGPPKPKANQQKQDNARGLVLPGYK |
| | | YLGPGNGLDKGDPVNFADEVAREHDLSYQKQLEAGDNPYLKYNHADAEFQ |
| | | EKLASDTSFGGNLGKAVFQAKKRILEPLGLVETPDKTAPAAKKRPLEQSP |
| | | QEPDSSSGVGKKGKQPARKRLNFDDEPGAGDGPPPEGPSSGAMSTETEMR |
| | | AAAGGNGGDAGQGAEGVGNASGDWHCDSTWSESHVTTTSTRTWVLPTYNN |
| | | HLYLRLGSSNASDTFNGFSTPWGYFDFNRFHCHFSPRDWQRLINNHWGLR |
| | | PKSMQVRIFNIQVKEVTTSNGETTVSNNLTSTVQIFADSTYELPYVMDAG |
| | | QEGSLPPFPNDVFMVPQYGYCGLVTGGSSQNQTDRNAFYCLEYFPSQMLR |
| | | TGNNFEMVYKFENVPFHSMYAHSQSLDRLMNPLLDQYLWELQSTTSGGTL |
| | | NQGNSATNFAKLTKTNFSGYRKNWLPGPMMKQQRFSKTASQNYKIPQGRN |
| | | NSLLHYETRTTLDGRWSNFAPGTAMATAANDATDFSQAQLIFAGPNITGN |
| | | TTTDANNLMFTSEDELRATNPRDTDLFGHLATNQQNATTVPTVDDVDGVG |
| | | VYPGMVWQDRDIYYQGPIWAKIPHTDGHFHPSPLIGGFGLKSPPPQIFIK |
| | | NTPVPANPATTFSPARINSFITQYSTGQVAVKIEWEIQKERSKRWNPEVQ |
| | | FTSNYGAQDSLLWAPDNAGAYKEPRAIGSRYLTNHL |
| 2 | AAVmo | MSFFDWLGKQYAQGAAEFWDLKSGPPAPKKARKDGSAGFNFPGHKYLGPG |
| | | NSLDRGDPVDADDAAAQKHDQSYQEQLEAGDNPYLKYNHADREFQEALKD |
| | | DTSFEGNLARGLFEAKKLVAEPLGLVEPELAPPSGRKRPVQSSQESGYSS |
| | | SQDKRPNLDVDEEDREFAAAAAETETGSAPPTGNLGPGTMAGGGSAPIDD |
| | | GSYGADGVGNASGDWHCDSTWLDNCVITRTTRTWNLPTYNNHIYKRLNGT |
| | | TSGDQSYFGFSTPWGYFDFNRFHCHFSPRDWQRLINNNWGLRPKSLRFKI |
| | | FNIQVKEVTTQDSTKIISNNLTSTVQVFADTEYQLPYVIGSAHEGCLPPF |
| | | PADVFMLPQYGYCTRQDGNSNNPTPRSAFYCLEYFPSKMLRTGNSFEFTY |
| | | NFEKVPFHSMWAHNQSLDRLMNPLIDQYLYYLDVTSSTGFTYQKGVHTNL |
| | | PEQERNWLPGPGIRNQAWFNSATGNNPLTGTWQYSNKYVLENRASKIAPG |
| | | PAMGIESTKFDGNGIIFSKEYITNVNTANPNQVNITRETEINSTNPLAGG |
| | | SLGAHANNSQNTTTAPTLDHTNVMGVFPGSVWQDRDIYLQGQIWAKIPHT |
| | | DGHFHPSPLMGGFGLKNPPPQILIKNTPVPADPPTEFNANKISSFITQYS |
| | | TGQVTVEMEWELQKETSKRWNPEIQYSDDSSSTSGSILHFAPDDVGNYKE |
| | | FRSIGTRYLTRPL |
| 3 | AAV2 | MAADGYLPDWLEDTLSEGIRQWWKLKPGPPPPKPAERHKDDSRGLVLPGY |
| | | KYLGPFNGLDKGEPVNEADAAALEHDKAYDRQLDSGDNPYLKYNHADAEF |
| | | QERLKEDTSFGGNLGRAVFQAKKRVLEPLGLVEEPVKTAPGKKRPVEHSP |
| | | VEPDSSSGTGKAGQQPARKRLNFGQTGDADSVPDPQPLGQPPAAPSGLGT |
| | | NTMATGSGAPMADNNEGADGVGNSSGNWHCDSTWMGDRVITTSTRTWALP |
| | | TYNNHLYKQISSQSGASNDNHYFGYSTPWGYFDFNRFHCHFSPRDWQRLI |
| | | NNNWGFRPKRLNFKLFNIQVKEVTQNDGTTTIANNLTSTVQVFTDSEYQL |
| | | PYVLGSAHQGCLPPFPADVFMVPQYGYLTLNNGSQAVGRSSFYCLEYFPS |
| | | QMLRTGNNFTFSYTFEDVPFHSSYAHSQSLDRLMNPLIDQYLYYLSRTNT |
| | | PSGTTTQSRLQFSQAGASDIRDQSRNWLPGPCYRQQRVSKTSADNNNSEY |
| | | SWTGATKYHLNGRDSLVNPGPAMASHKDDEEKFFPQSGVLIFGKQGSEKT |
| | | NVDIEKVMITDEEEIRTTNPVATEQYGSVSTNLQRGNRQAATADVNTQGV |
| | | LPGMVWQDRDVYLQGPIWAKIPHTDGHFHPSPLMGGFGLKHPPPQILIKN |
| | | TPVPANPSTTFSAAKFASFITQYSTGQVSVEIEWELQKENSKRWNPEIQY |
| | | TSNYNKSVNVDFTVDTNGVYSEPRPIGTRYLTRNL |
| 4 | AAV4 | MTDGYLPDWLEDNLSEGVREWWALQPGAPKPKANQQHQDNARGLVLPGYK |
| | | YLGPGNGLDKGEPVNAADAAALEHDKAYDQQLKAGDNPYLKYNHADAEFQ |
| | | QRLQGDTSFGGNLGRAVFQAKKRVLEPLGLVEQAGETAPGKKRPLIESPQ |
| | | QPDSSTGIGKKGKQPAKKKLVFEDETGAGDGPPEGSTSGAMSDDSEMRAA |
| | | AGGAAVEGGQGADGVGNASGDWHCDSTWSEGHVTTTSTRTWVLPTYNNHL |
| | | YKRLGESLQSNTYNGFSTPWGYFDFNRFHCHFSPRDWQRLINNNWGMRPK |
| | | AMRVKIFNIQVKEVTTSNGETTVANNLTSTVQIFADSSYELPYVMDAGQE |
| | | GSLPPFPNDVFMVPQYGYCGLVTGNTSQQQTDRNAFYCLEYFPSQMLRTG |
| | | NNFEITYSFEKVPFHSMYAHSQSLDRLMNPLIDQYLWGLQSTTTGTTLNA |
| | | GTATTNFTKLRPTNFSNFKKNWLPGPSIKQQGFSKTANQNYKIPATGSDS |
| | | LIKYETHSTLDGRWSALTPGPPMATAGPADSKFSNSQLIFAGPKQNGNTA |
| | | TVPGTLIFTSEEELAATNATDTDMWGNLPGGDQSNSNLPTVDRLTALGAV |
| | | PGMVWQNRDIYYQGPIWAKIPHTDGHFHPSPLIGGFGLKHPPPQIFIKNT |
| | | PVPANPATTFSSTPVNSFITQYSTGQVSVQIDWEIQKERSKRWNPEVQFT |
| | | SNYGQQNSLLWAPDAAGKYTEPRAIGTRYLTHHL |
| 5 | AAV5 | MSFVDHPPDWLEEVGEGLREFLGLEAGPPKPKPNQQHQDQARGLVLPGYN |
| | | YLGPGNGLDRGEPVNRADEVAREHDISYNEQLEAGDNPYLKYNHADAEFQ |
| | | EKLADDTSFGGNLGKAVFQAKKRVLEPFGLVEEGAKTAPTGKRIDDHFPK |
| | | RKKARTEEDSKPSTSSDAEAGPSGSQQLQIPAQPASSLGADTMSAGGGGP |
| | | LGDNNQGADGVGNASGDWHCDSTWMGDRVVTKSTRTWVLPSYNNHQYREI |
| | | KSGSVDGSNANAYFGYSTPWGYFDFNRFHSHWSPRDWQRLINNYWGFRPR |
| | | SLRVKIFNIQVKEVTVQDSTTTIANNLTSTVQVFTDDDYQLPYVVGNGTE |
| | | GCLPAFPPQVFTLPQYGYATLNRDNTENPTERSSFFCLEYFPSKMLRTGN |
| | | NFEFTYNFEEVPFHSSFAPSQNLFKLANPLVDQYLYRFVSTNNTGGVQFN |
| | | KNLAGRYANTYKNWFPGPMGRTQGWNLGSGVNRASVSAFATTNRMELEGA |
| | | SYQVPPQPNGMTNNLQGSNTYALENTMIFNSQPANPGTTATYLEGNMLIT |
| | | SESETQPVNRVAYNVGGQMATNNQSSTTAPATGTYNLQEIVPGSVWMERD |
| | | VYLQGPIWAKIPETGAHFHPSPAMGGFGLKHPPPMMLIKNTPVPGNITSF |
| | | SDVPVSSFITQYSTGQVTVEMEWELKKENSKRWNPEIQYTNNYNDPQFVD |
| | | FAPDSTGEYRTTRPIGTRYLTRPL |
| 6 | AAV6 | MAADGYLPDWLEDNLSEGIREWWDLKPGAPKPKANQQKQDDGRGLVLPGY |
| | | KYLGPFNGLDKGEPVNAADAAALEHDKAYDQQLKAGDNPYLRYNHADAEF |
| | | QERLQEDTSFGGNLGRAVFQAKKRVLEPFGLVEEGAKTAPGKKRPVEQSP |
| | | QEPDSSSGIGKTGQQPAKKRLNFGQTGDSESVPDPQPLGEPPATPAAVGP |
| | | TTMASGGGAPMADNNEGADGVGNASGNWHCDSTWLGDRVITTSTRTWALP |
| | | TYNNHLYKQISSASTGASNDNHYFGYSTPWGYFDFNRFHCHFSPRDWQRL |
| | | INNNWGFRPKRLNFKLFNIQVKEVTTNDGVTTIANNLTSTVQVFSDSEYQ |
| | | LPYVLGSAHQGCLPPFPADVFMIPQYGYLTLNNGSQAVGRSSFYCLEYFP |
| | | SQMLRTGNNFTFSYTFEDVPFHSSYAHSQSLDRLMNPLIDQYLYYLNRTQ |
| | | NQSGSAQNKDLLFSRGSPAGMSVQPKNWLPGPCYRQQRVSKTKTDNNNSN |
| | | FTWTGASKYNLNGRESIINPGTAMASHKDDKDKFFPMSGVMIFGKESAGA |
| | | SNTALDNVMITDEEEIKATNPVATERFGTVAVNLQSSSTDPATGDVHVMG |
| | | ALPGMVWQDRDVYLQGPIWAKIPHTDGHFHPSPLMGGFGLKHPPPQILIK |
| | | NTPVPANPPAEFSATKFASFITQYSTGQVSVEIEWELQKENSKRWNPEVQ |
| | | YTSNYAKSANVDFTVDNNGLYTEPRPIGTRYLTRPL |
| 7 | AAV6.2 | MAADGYLPDWLEDNLSEGIREWWDLKPGAPKPKANQQKQDDGRGLVLPGY |
| | | KYLGPFNGLDKGEPVNAADAAALEHDKAYDQQLKAGDNPYLRYNHADAEF |
| | | QERLQEDTSFGGNLGRAVFQAKKRVLEPLGLVEEGAKTAPGKKRPVEQSP |
| | | QEPDSSSGIGKTGQQPAKKRLNFGQTGDSESVPDPQPLGEPPATPAAVGP |
| | | TTMASGGGAPMADNNEGADGVGNASGNWHCDSTWLGDRVITTSTRTWALP |
| | | TYNNHLYKQISSASTGASNDNHYFGYSTPWGYFDFNRFHCHFSPRDWQRL |
| | | INNNWGFRPKRLNFKLFNIQVKEVTTNDGVTTIANNLTSTVQVFSDSEYQ |
| | | LPYVLGSAHQGCLPPFPADVFMIPQYGYLTLNNGSQAVGRSSFYCLEYFP |
| | | SQMLRTGNNFTFSYTFEDVPFHSSYAHSQSLDRLMNPLIDQYLYYLNRTQ |
| | | NQSGSAQNKDLLFSRGSPAGMSVQPKNWLPGPCYRQQRVSKTKTDNNNSN |
| | | FTWTGASKYNLNGRESIINPGTAMASHKDDKDKFFPMSGVMIFGKESAGA |
| | | SNTALDNVMITDEEEIKATNPVATERFGTVAVNLQSSSTDPATGDVHVMG |
| | | ALPGMVWQDRDVYLQGPIWAKIPHTDGHFHPSPLMGGFGLKHPPPQILIK |
| | | NTPVPANPPAEFSATKFASFITQYSTGQVSVEIEWELQKENSKRWNPEVQ |
| | | YTSNYAKSANVDFTVDNNGLYTEPRPIGTRYLTRPL |
| 8 | AAV7 | MAADGYLPDWLEDNLSEGIREWWDLKPGAPKPKANQQKQDNGRGLVLPGY |
| | | KYLGPFNGLDKGEPVNAADAAALEHDKAYDQQLKAGDNPYLRYNHADAEF |
| | | QERLQEDTSFGGNLGRAVFQAKKRVLEPLGLVEEGAKTAPAKKRPVEPSP |
| | | QRSPDSSTGIGKKGQQPARKRLNFGQTGDSESVPDPQPLGEPPAAPSSVG |
| | | SGTVAAGGGAPMADNNEGADGVGNASGNWHCDSTWLGDRVITTSTRTWAL |
| | | PTYNNHLYKQISSETAGSTNDNTYFGYSTPWGYFDFNRFHCHFSPRDWQR |
| | | LINNNWGFRPKKLRFKLFNIQVKEVTTNDGVTTIANNLTSTIQVFSDSEY |
| | | QLPYVLGSAHQGCLPPFPADVFMIPQYGYLTLNNGSQSVGRSSFYCLEYF |
| | | PSQMLRTGNNFEFSYSFEDVPFHSSYAHSQSLDRLMNPLIDQYLYYLART |
| | | QSNPGGTAGNRELQFYQGGPSTMAEQAKNWLPGPCFRQQRVSKTLDQNNN |
| | | SNFAWTGATKYHLNGRNSLVNPGVAMATHKDDEDRFFPSSGVLIFGKTGA |
| | | TNKTTLENVLMTNEEEIRPTNPVATEEYGIVSSNLQAANTAAQTQVVNNQ |
| | | GALPGMVWQNRDVYLQGPIWAKIPHTDGNFHPSPLMGGFGLKHPPPQILI |
| | | KNTPVPANPPEVFTPAKFASFITQYSTGQVSVEIEWELQKENSKRWNPEI |
| | | QYTSNFEKQTGVDFAVDSQGVYSEPRPIGTRYLTRNL |
| 9 | AAV8 | MAADGYLPDWLEDNLSEGIREWWALKPGAPKPKANQQKQDDGRGLVLPGY |
| | | KYLGPFNGLDKGEPVNAADAAALEHDKAYDQQLQAGDNPYLRYNHADAEF |
| | | QERLQEDTSFGGNLGRAVFQAKKRVLEPLGLVEEGAKTAPGKKRPVEPSP |
| | | QRSPDSSTGIGKKGQQPARKRLNFGQTGDSESVPDPQPLGEPPAAPSGVG |
| | | PNTMAAGGGAPMADNNEGADGVGSSSGNWHCDSTWLGDRVITTSTRTWAL |
| | | PTYNNHLYKQISNGTSGGATNDNTYFGYSTPWGYFDFNRFHCHFSPRDWQ |
| | | RLINNNWGFRPKRLSFKLFNIQVKEVTQNEGTKTIANNLTSTIQVFTDSE |
| | | YQLPYVLGSAHQGCLPPFPADVFMIPQYGYLTLNNGSQAVGRSSFYCLEY |
| | | FPSQMLRTGNNFQFTYTFEDVPFHSSYAHSQSLDRLMNPLIDQYLYYLSR |
| | | TQTTGGTANTQTLGFSQGGPNTMANQAKNWLPGPCYRQQRVSTTTGQNNN |
| | | SNFAWTAGTKYHLNGRNSLANPGIAMATHKDDEERFFPSNGILIFGKQNA |
| | | ARDNADYSDVMLTSEEEIKTTNPVATEEYGIVADNLQQQNTAPQIGTVNS |
| | | QGALPGMVWQNRDVYLQGPIWAKIPHTDGNFHPSPLMGGFGLKHPPPQIL |
| | | IKNTPVPADPPTTFNQSKLNSFITQYSTGQVSVEIEWELQKENSKRWNPE |
| | | IQYTSNYYKSTSVDFAVNTEGVYSEPRPIGTRYLTRNL |
| 10 | AAV9 | MAADGYLPDWLEDNLSEGIREWWALKPGAPQPKANQQHQDNARGLVLPGY |
| | | KYLGPGNGLDKGEPVNAADAAALEHDKAYDQQLKAGDNPYLKYNHADAEF |
| | | QERLKEDTSFGGNLGRAVFQAKKRLLEPLGLVEEAAKTAPGKKRPVEQSP |
| | | QEPDSSAGIGKSGAQPAKKRLNFGQTGDTESVPDPQPIGEPPAAPSGVGS |
| | | LTMASGGGAPVADNNEGADGVGSSSGNWHCDSQWLGDRVITTSTRTWALP |
| | | TYNNHLYKQISNSTSGGSSNDNAYFGYSTPWGYFDFNRFHCHFSPRDWQR |
| | | LINNNWGFRPKRLNFKLFNIQVKEVTDNNGVKTIANNLTSTVQVFTDSDY |
| | | QLPYVLGSAHEGCLPPFPADVFMIPQYGYLTLNDGSQAVGRSSFYCLEYF |
| | | PSQMLRTGNNFQFSYEFENVPFHSSYAHSQSLDRLMNPLIDQYLYYLSKT |
| | | INGSGQNQQTLKFSVAGPSNMAVQGRNYIPGPSYRQQRVSTTVTQNNNSE |
| | | FAWPGASSWALNGRNSLMNPGPAMASHKEGEDRFFPLSGSLIFGKQGTGR |
| | | DNVDADKVMITNEEEIKTTNPVATESYGQVATNHQSAQAQAQTGWVQNQG |
| | | ILPGMVWQDRDVYLQGPIWAKIPHTDGNFHPSPLMGGFGMKHPPPQILIK |
| | | NTPVPADPPTAFNKDKLNSFITQYSTGQVSVEIEWELQKENSKRWNPEIQ |
| | | YTSNYYKSNNVEFAVNTEGVYSEPRPIGTRYLTRNL |
| 11 | AAVrh8 | MAADGYLPDWLEDNLSEGIREWWDLKPGAPKPKANQQKQDDGRGLVLPGY |
| | | KYLGPFNGLDKGEPVNAADAAALEHDKAYDQQLKAGDNPYLRYNHADAEF |
| | | QERLQEDTSFGGNLGRAVFQAKKRVLEPLGLVEEGAKTAPGKKRPVEQSP |
| | | QEPDSSSGIGKTGQQPAKKRLNFGQTGDSESVPDPQPLGEPPAAPSGLGP |
| | | NTMASGGGAPMADNNEGADGVGNSSGNWHCDSTWLGDRVITTSTRTWALP |
| | | TYNNHLYKQISNGTSGGSTNDNTYFGYSTPWGYFDFNRFHCHFSPRDWQR |
| | | LINNNWGFRPKRLNFKLFNIQVKEVTTNEGTKTIANNLTSTVQVFTDSEY |
| | | QLPYVLGSAHQGCLPPFPADVFMVPQYGYLTLNNGSQALGRSSFYCLEYF |
| | | PSQMLRTGNNFQFSYTFEDVPFHSSYAHSQSLDRLMNPLIDQYLYYLVRT |
| | | QTTGTGGTQTLAFSQAGPSSMANQARNWVPGPCYRQQRVSTTTNQNNNSN |
| | | FAWTGAAKFKLNGRDSLMNPGVAMASHKDDDDRFFPSSGVLIFGKQGAGN |
| | | DGVDYSQVLITDEEEIKATNPVATEEYGAVAINNQAANTQAQTGLVHNQG |
| | | VIPGMVWQNRDVYLQGPIWAKIPHTDGNFHPSPLMGGFGLKHPPPQILIK |
| | | NTPVPADPPLTFNQAKLNSFITQYSTGQVSVEIEWELQKENSKRWNPEIQ |
| | | YTSNYYKSTNVDFAVNTEGVYSEPRPIGTRYLTRNL |
| 12 | AAVrh 10 | MAADGYLPDWLEDNLSEGIREWWDLKPGAPKPKANQQKQDDGRGLVLPGY |
| | | KYLGPFNGLDKGEPVNAADAAALEHDKAYDQQLKAGDNPYLRYNHADAEF |
| | | QERLQEDTSFGGNLGRAVFQAKKRVLEPLGLVEEGAKTAPGKKRPVEPSP |
| | | QRSPDSSTGIGKKGQQPAKKRLNFGQTGDSESVPDPQPIGEPPAGPSGLG |
| | | SGTMAAGGGAPMADNNEGADGVGSSSGNWHCDSTWLGDRVITTSTRTWAL |
| | | PTYNNHLYKQISNGTSGGSTNDNTYFGYSTPWGYFDFNRFHCHFSPRDWQ |
| | | RLINNNWGFRPKRLNFKLFNIQVKEVTQNEGTKTIANNLTSTIQVFTDSE |
| | | YQLPYVLGSAHQGCLPPFPADVFMIPQYGYLTLNNGSQAVGRSSFYCLEY |
| | | FPSQMLRTGNNFEFSYQFEDVPFHSSYAHSQSLDRLMNPLIDQYLYYLSR |
| | | TQSTGGTAGTQQLLFSQAGPNNMSAQAKNWLPGPCYRQQRVSTTLSQNNN |
| | | SNFAWTGATKYHLNGRDSLVNPGVAMATHKDDEERFFPSSGVLMFGKQGA |
| | | GKDNVDYSSVMLTSEEEIKTTNPVATEQYGVVADNLQQQNAAPIVGAVNS |
| | | QGALPGMVWQNRDVYLQGPIWAKIPHTDGNFHPSPLMGGFGLKHPPPQIL |
| | | IKNTPVPADPPTTFSQAKLASFITQYSTGQVSVEIEWELQKENSKRWNPE |
| | | IQYTSNYYKSTNVDFAVNTDGTYSEPRPIGTRYLTRNL |
| 13 | AAVanc80 | MAADGYLPDWLEDNLSEGIREWWDLKPGAPKPKANQQKQDDGRGLVLPGY |
| | | KYLGPFNGLDKGEPVNAADAAALEHDKAYDQQLKAGDNPYLRYNHADAEF |
| | | QERLQEDTSFGGNLGRAVFQAKKRVLEPLGLVEEGAKTAPGKKRPVEQSP |
| | | QEPDSSSGIGKKGQQPARKRLNFGQTGDSESVPDPQPLGEPPAAPSGVGS |
| | | NTMAAGGGAPMADNNEGADGVGNASGNWHCDSTWLGDRVITTSTRTWALP |
| | | TYNNHLYKQISSQSGGSTNDNTYFGYSTPWGYFDFNRFHCHFSPRDWQRL |
| | | INNNWGFRPKKLNFKLFNIQVKEVTTNDGTTTIANNLTSTVQVFTDSEYQ |
| | | LPYVLGSAHQGCLPPFPADVFMIPQYGYLTLNNGSQAVGRSSFYCLEYFP |
| | | SQMLRTGNNFQFSYTFEDVPFHSSYAHSQSLDRLMNPLIDQYLYYLSRTQ |
| | | TTSGTAGNRTLQFSQAGPSSMANQAKNWLPGPCYRQQRVSKTTNQNNNSN |
| | | FAWTGATKYHLNGRDSLVNPGPAMATHKDDEDKFFPMSGVLIFGKQGAGN |
| | | SNVDLDNVMITNEEEIKTTNPVATEEYGTVATNLQSANTAPATGTVNSQG |
| | | ALPGMVWQDRDVYLQGPIWAKIPHTDGHFHPSPLMGGFGLKHPPPQILIK |
| | | NTPVPANPPTTFSPAKFASFITQYSTGQVSVEIEWELQKENSKRWNPEIQ |
| | | YTSNYNKSTNVDFAVDTNGVYSEPRPIGTRYLTRNL |
| 14 | AAVanc110 | MAADGYLPDWLEDNLSEGIREWWDLKPGAPKPKANQQKQDDGRGLVLPGY |
| | | KYLGPFNGLDKGEPVNAADAAALEHDKAYDQQLKAGDNPYLRYNHADAEF |
| | | QERLQEDTSFGGNLGRAVFQAKKRVLEPLGLVEEGAKTAPGKKRPVEQSP |
| | | QEPDSSSGIGKTGQQPAKKRLNFGQTGDSESVPDPQPLGEPPAAPSGVGS |
| | | NTMASGGGAPMADNNEGADGVGNSSGNWHCDSTWLGDRVITTSTRTWALP |
| | | TYNNHLYKQISNGTSGGSTNDNTYFGYSTPWGYFDFNRFHCHFSPRDWQR |
| | | LINNNWGFRPKRLNFKLFNIQVKEVTTNEGTKTIANNLTSTVQVFTDSEY |
| | | QLPYVLGSAHQGCLPPFPADVFMIPQYGYLTLNNGSQAVGRSSFYCLEYF |
| | | PSQMLRTGNNFQFSYTFEDVPFHSSYAHSQSLDRLMNPLIDQYLYYLSRT |
| | | QTTGTAGTQTLQFSQAGPSSMANQARNWVPGPCYRQQRVSTTTNQNNNSN |
| | | FAWTGATKYHLNGRDSLMNPGVAMASHKDDEDRFFPSSGVLIFGKQGAGN |
| | | DNVDYSQVMITNEEEIKTTNPVATEEYGAVATNNQSANTQAQTGLVHNQG |
| | | VLPGMVWQNRDVYLQGPIWAKIPHTDGNFHPSPLMGGFGLKHPPPQILIK |
| | | NTPVPADPPTTFNQAKLNSFITQYSTGQVSVEIEWELQKENSKRWNPEIQ |
| | | YTSNYYKSTNVDFAVNTEGVYSEPRPIGTRYLTRNL |
| 173 | LK03 | MAADGYLPDWLEDNLSEGIREWWALQPGAPKPKANQQHQDNARGLVLPGY |
| | | KYLGPGNGLDKGEPVNAADAAALEHDKAYDQQLKAGDNPYLKYNHADAEF |
| | | QERLKEDTSFGGNLGRAVFQAKKRLLEPLGLVEEAAKTAPGKKRPVDQSP |
| | | QEPDSSSGVGKSGKQPARKRLNFGQTGDSESVPDPQPLGEPPAAPTSLGS |
| | | NTMASGGGAPMADNNEGADGVGNSSGNWHCDSQWLGDRVITTSTRTWALP |
| | | TYNNHLYKQISSQSGASNDNHYFGYSTPWGYFDFNRFHCHFSPRDWQRLI |
| | | NNNWGFRPKKLSFKLFNIQVKEVTQNDGTTTIANNLTSTVQVFTDSEYQL |
| | | PYVLGSAHQGCLPPFPADVFMVPQYGYLTLNNGSQAVGRSSFYCLEYFPS |
| | | QMLRTGNNFQFSYTFEDVPFHSSYAHSQSLDRLMNPLIDQYLYYLNRTQG |
| | | TTSGTTNQSRLLFSQAGPQSMSLQARNWLPGPCYRQQRLSKTANDNNNSN |
| | | FPWTAASKYHLNGRDSLVNPGPAMASHKDDEEKFFPMHGNLIFGKEGTTA |
| | | SNAELDNVMITDEEEIRTTNPVATEQYGTVANNLQSSNTAPTTRTVNDQG |
| | | ALPGMVWQDRDVYLQGPIWAKIPHTDGHFHPSPLMGGFGLKHPPPQIMIK |
| | | NTPVPANPPTTFSPAKFASFITQYSTGQVSVEIEWELQKENSKRWNPEIQ |
| | | YTSNYNKSVNVDFTVDTNGVYSEPRPIGTRYLTRPL |
| 165 | Bba.45 | atggctgctgacggttatcttccagattggctcgaggacaacctctctga |
| | | aggcattcgcgagtggtgggcgctgaaacctggagccccacagcccaagg |
| | | caaatcgacaacatcaagacaacgctcggggtcttgtgcttccgggttac |
| | | aaatacttgggacccggtaacggactcgacaagggagagccggtcaacga |
| | | ggcagacgccgcggccctcgagcacgacaaggcctacgaccagcagctca |
| | | agtcgggagacaacccgtacctcaagtacaaccacgcggacgccgagttc |
| | | cagcagcgcttggcgaccgacacctcttttgggggcaacctcggcaaggc |
| | | agtcttccaggccaaaaagaggattctcgagcctctgggtctggttgaag |
| | | agggcgttaaaacggctcctggaaagaaacgcccattagaaaagactcca |
| | | aatcggccgaccaacccggactctgggaaggccccggccaagaaaaagca |
| | | aaaagacggcgagacagccgactctgctagaagggcactcgactttgaag |
| | | actctggagcaggagacggaccccctgagggatcatcttccggagaaatg |
| | | tctcatgatgctgagatgcgtgcggcgccaggcggaaatgctgtcgaggc |
| | | gggacaaggtgccgatggagtgggtaatgcctccggtgattggcattgcg |
| | | attccacctggtcagagggccgagtcaccaccaccagcacccgaacctgg |
| | | gtcctgcccacctacaacaaccacctgtacctgcgaatcggaacaacggc |
| | | caacagcaacacctacaatggattctccaccccctggggatactttgact |
| | | ttaaccgcttccactgccacttttccccacgcgactggcagcgactcatc |
| | | aacaacaactggggactcaggccgaaatcgatgcgtgttaaaatcttcaa |
| | | catccaggtcagggaggtcactacgtcaaacggcgagactacggtcgcta |
| | | ataaccttaccagcacggttcagatctttgcggattcaacgtatgaactc |
| | | ccatacgtgatggacgccggtcaggaggggagccttcctccgttccccaa |
| | | cgacgtgtttatggttccccaatacgggtactgcggagtcgtcactggag |
| | | aaaaccagaaccaaacagacagaaatgccttttactgtctggagtacttt |
| | | ccatcccaaatgctaagaactggcaacaactttgaaatcagttaccaatt |
| | | tgaaaaagttcctttccattcaatgtacgcgcacagccagagcctggaca |
| | | gaatgatgaatcctttgctggatcagtacctgtggcatctgcaatcgacc |
| | | actaccggaaattcccttaatcaaggaacagctaccaccacgtacgggaa |
| | | aattaccactggggactttgcctactacaggaaaaactggttacctggag |
| | | cctgcattaaacaacaaaaattttcaaagaatgccagtcaaaactacaag |
| | | attcccgccagcgggggagacgcccttttaaagtatgacacgcataccac |
| | | tttaaatgggcgatggagtaacatggctcctggtcctccaatggccaccg |
| | | caggtgccggggactcggattttagcaacagccagctgatctttgccgga |
| | | cccaatcagagcggtaacacgaccacgtcttcaaacaatttgttgtttac |
| | | ctcagaagaggagattgccacaacaaacccacgagacacggacatgtttg |
| | | gacagattgcagataataatcaaaatgccaccaccgcccctcacatcgct |
| | | aacctggacgctatgggaattgttcccggaatggtctggcaaaacagaga |
| | | catctactaccagggccctatttgggccaaggtccctcacacggacggac |
| | | actttcacccttcgccgctgatgggaggatttggactgaaacacccgcct |
| | | ccgcagattttcatcaaaaacacccccgtacccgccaatcccaatactac |
| | | ctttagcgctgcaaggatcaattcttttttgacgcagtacagcaccggac |
| | | aagtcgccgttcagatcgactgggaaattcagaaggagcactccaaacgc |
| | | tggaatcccgaagtccaatttacttcaaactacggcactcaaaattctat |
| | | gctgtgggctcccgacaacgccggcaactaccacgaaccccgggctattg |
| | | ggtcccgtttcctcacccaccacttgtaa |
| 166 | Bba.46 | atggctgctgacggttatcttccagattggctcgaggacaacctctctga |
| | | aggcattcgcgagtggtgggcgctgaaacctggagccccacagcccaagg |
| | | caaatcaacaacatcaagacaacgctcggggtcttgtgcttccgggttac |
| | | aaatacttgggacccggtaacggactcgacaagggagagccggtcaacga |
| | | ggcagacgccgcggccctcgagcacgacaaggcctacgaccagcagctca |
| | | agtcgggagacaacccgtacctcaagtacaaccacgcggacgccgagttc |
| | | cagcagcgcttggcgaccgacacctcttttgggggcaacctcggcaaggc |
| | | agtcttccaggccaaaaagaggattctcgagcctctgggtctggttgaag |
| | | agggcgttaaaacggctcctggaaagaaacgcccattagaaaagactcca |
| | | aatcggccgaccaacccggactctgggaaggccccggccaagaaaaagca |
| | | aaaagacggcgagacagccgactctgctagaaggacactcgactttgaag |
| | | actctggagcaggagacggaccccctgagggatcatcttccggagaaatg |
| | | tctcatgacgctgagatgcgtgcggcgccaggcggaaatgctgtcgaggc |
| | | gggacaaggtgccgatggagtgggtaatgcctccggtgattggcattgcg |
| | | attccacctggtcagagggccgagtcaccaccaccagcacccgaacctgg |
| | | gtcctgcccacctacaacaaccacctgtacctgcgaatcggaacaacggc |
| | | caacagcaacacctacaatggattctccaccccctggggatgctttgact |
| | | ttaaccgcttccactgccacttttccccacgcgactggcagcgactcatc |
| | | aacaacaactggggactcaggccgaaatcgatgcgtgttaaaatcttcaa |
| | | catccaggtcaaggaggtcactacgtcaaacggcgagactacggtcgcta |
| | | ataaccttaccagcacggttcagatctttgcggattcaacgtatgaactc |
| | | ccatacgtgatggacgccggtcaggaggggagccttcctccgttccccaa |
| | | cgacgtgtttatggttccccaatacgggtactgcggagtcgtcactggag |
| | | aaaaccagaaccaaacagacagaaatgccttttactgtctggagtacttt |
| | | ccatcccaaatgctaagaactggcaacaactttgaaatcagttaccaatt |
| | | tgaaaaagttcctttccattcaatgtacgcgcacagccagagcctggaca |
| | | gaatgatgaatcctttgctggatcagtacctgtggcatctgcaatcgacc |
| | | actaccggaaattcccttaatcaaggagcagctaccaccacgtacgggaa |
| | | aattaccactggggactttgcctactacaggaaaaactggttgcctggag |
| | | cctgcattaaacaacaaaaattttcaaagaatgccagtcaaaactacaag |
| | | atccccgccagcgggggagacgcccttttaaagtatgacacgcataccac |
| | | tttaaatgggcgatggagtaacatggctcctggtcctccaatggccaccg |
| | | caggtgccggggactcggattttagcaacagccagctgatctttgccgga |
| | | cccaatcagagcggtaacacgaccacgtcttcaaacaatttgttgtttac |
| | | ctcagaagaggagattgccacaacaaacccacgagacacggacatgtttg |
| | | gacagattgcagataataatcaaaatgccaccaccgcccctcacatcgct |
| | | aacctggacgctatgggaattgttcccggaatggtctggcaaaacagaga |
| | | catctactaccagggccctatttgggccaaggtccctcacacggacggac |
| | | actttcacccttcgccgctgatgggaggatttggactgaaacacccgcct |
| | | ccgcagattttcatcaaaaacacccccgtacccgccaatcccaatactac |
| | | ctttagcgctgcaaggatcaattcttttttgacgcagtacagcaccggac |
| | | aagtcgccgttcagatcgactgggaaattcagaaggagcactccaaacgc |
| | | tggaatcccgaagtccaatttacttcaaactacggcactcaaaattctat |
| | | gctgtgggctcccgacaacgccggcaactaccacgaaccccgggctattg |
| | | ggtcccgtttcctcacccaccacttgtaa |
| 167 | Bba.47 | atggctgctgacggttatcttccagattggctcgaggacaacctctctga |
| | | aggcattcgcgagtggtgggcgctgaaacctggagccccacagcccaagg |
| | | caaatcaacaacatcaagacaacgctcggggtcttgtgcttccgggttac |
| | | aaatacttgggacccggtaacggactcgacaagggagagccggtcaacga |
| | | ggcagacgccgcggccctcgagcacgacaaggcctacgaccagcagctca |
| | | agtcgggagacaacccgtacctcaagtacaaccacgcggacgccgagttc |
| | | cagcagcgcttggcgaccgacacctcttttgggggcaacctcggcaaggc |
| | | agtcttccaggccaaaaagaggattctcgagcctctgggtctggttgaag |
| | | agggcgttaaaacggctcctggaaagaaacgcccattagaaaagactcca |
| | | aatcggccgaccaacccggactctgggaaggccccggccaagaaaaagca |
| | | aaaagacggcgagacagccgactctgctagaaggacactcgactttgaag |
| | | actctggagcaggagacggacctcctgagggatcatcttccggagaaatg |
| | | tctcatgatgctgagatgcgtgcggcgccaggcggaaatgctgtcgaggc |
| | | gggacaaggtgccgatggagtgggtaatgcctccggtgattggcattgcg |
| | | attccacctggtcagagggccgagtcaccaccaccagcacccgaacctgg |
| | | gtcctgcccacctacaacaaccacctgtacctgcgaatcggaacaacggc |
| | | caacagcaacacctacaatggattctccaccccctggggatactttgact |
| | | ttaaccgcttccactgccacttttccccacgcgactggcagcgactcatc |
| | | aacaacaactggggactcaggccgaaatcgatgcgtgttaaaatcttcaa |
| | | catccaggtcaaggaggtcactacgtcaaacggcgagactacggtcgcta |
| | | ataaccttaccagcacggttcagatctttgcggattcaacgtatgaactc |
| | | ccatacgtgatggacgccggtcaggaggggagccttcctccgttccccaa |
| | | cgacgtgtttatggttccccaatacgggtactgcggagtcgtcactggag |
| | | aaaaccagaaccaaacagacagaaatgccttttactgtctggagtacttt |
| | | ccatcccaaatgctaagaactggcaacaactttgaaatcagttaccaatt |
| | | tgaaaaagttcctttccattcaatgtacgcgcacagccagagcctggaca |
| | | gaatgatgaatcctttgctggatcagtacctgtggcatctgcaatcgacc |
| | | actaccggaaattcccttaatcaaggaacagctaccaccacgtacgggaa |
| | | aattaccactggggactttgcctactacaggaaaaactggttgcctggag |
| | | cctgcattaaacaacaaaaattttcaaagaatgccagtcaaaactacaag |
| | | attcccgccagcgggggagacgcccttttaaagtatgacacgcataccac |
| | | tttaaatgggcgatggagtaacatggctcctggtcctccaatggccaccg |
| | | caggtgccggggactcggattttagcaacagccagctgatctttgccgga |
| | | cccaatcagagcggtaacacgaccacgtcttcaaacaatttgttgtttac |
| | | ctcagaagaggagattgccacaacaaacccacgagacacggacatgtttg |
| | | ggcagattgcagataataatcaaaatgccaccaccgcccctcacatcgct |
| | | aacctggacgctatgggaattgttcccggaatggtctggcaaaacagaga |
| | | catctactaccagggccctatttgggccaaggtccctcacacggacggac |
| | | actttcacccttcgccgctgatgggaggatttggactgaaacacccgcct |
| | | ccgcagattttcatcaaaaacacccccgtacccgccaatcccaatactac |
| | | ctttagcgctgcaaggatcaattcttttttgacgcagtacagcaccggac |
| | | aagtcgccgttcagatcgactgggaaattcagaaggagcactccaaacgc |
| | | tggaatcccgaagtccaatttacttcaaactacggcactcaaaattctat |
| | | gctgtgggctcccgacaacgccggcaactaccacgaaccccgggctattg |
| | | ggtcccgtttcctcacccaccacttgtaa |
| 168 | Bba.48 | atggctgctgacggttatcttccagattggctcgaggacaacctctctga |
| | | aggcattcgcgagtggtgggcgctgaaacctggagccccacagcccaagg |
| | | caaatcaacaacatcaagacaacgctcggggtcttgtgcttccgggttac |
| | | aaatacttgggacccggtaacggactcgacaagggagagccggtcaacga |
| | | ggcagacgccgcggccctcgagcacgacaaggcctacgaccagcagctca |
| | | agtcgggagacaacccgtacctcaagtacaaccacgcggacgccgagttt |
| | | caggagcgtcttcaagaagatacgtcttttgggggcaacctcgggcgagc |
| | | agtcttccaggccaaaaagaggattctcgagcctctgggtctggttgaag |
| | | agggcgttaaaacggctcctggaaagaaacgcccattagaaaagactcca |
| | | aatcggccgaccaacccggactctgggaaggccccggccaagaaaaagca |
| | | aaaagacggcgagacagccgactctgctagaaggacactcgactttgaag |
| | | actctggagcaggagacggaccccctgagggatcatcttccggagaaatg |
| | | tctcatgatgctgagatgcgtgcggcgccaggcggaaatgctgtcgaggc |
| | | gggacaaggtgccgatggagtgggtaatgcctccggtgattggcattgcg |
| | | attccacctggtcagagggccgagtcaccaccaccagcacccgaacctgg |
| | | gtcctgcccacctacaacaaccacctgtacctgcgaatcggaacaacggc |
| | | caacagcaacacctacaatggattctccaccccctggggatactttgact |
| | | ttaaccgcttccactgccgcttttccccgcgcgactggcagcgactcatc |
| | | aacaacaactggggactcaggccgaaatcgatgcgtgttaaaatcttcaa |
| | | catccaggtcaaggaggtcactacgtcaaacggcgagactacggtcgcta |
| | | ataaccttaccagcacggttcagatctttgcggattcaacgtatgaactc |
| | | ccatacgtgatggacgccggtcaggaggggagccttcctccgttccccaa |
| | | cgacgtgtttatggttccccaatacgggtactgcggagtcgtcactggag |
| | | aaaaccagaaccaaacagacagaaatgccttttactgtctggagtacttt |
| | | ccatcccaaatgctaagaactggcaacaactttgaaatcagttaccaatt |
| | | tgaaaaagttcctttccattcaatgtacgcgcacagccagagcctggaca |
| | | gaatgatgaatcctttgctggatcagtacctgtggcatctgcaatcgacc |
| | | actaccggaaattcccttaatcaaggaacagctatcaccacgtacgggaa |
| | | aattaccactggggactttgcctactacaggaaaaactggttgcctggag |
| | | cctgcattaaacaacaaaaattttcaaagaatgccagtcaaaactacaag |
| | | attcccgccagcgggggagacgcccttttaaagtatgacacgcataccac |
| | | tttaaatgggcgatggagtaacatggctcctggtcctccaatggccaccg |
| | | caggtgccggggactcggattttagcaacagccagctgatctttgccgga |
| | | cccaatcagagcggtaacacgaccacgtcttcaaacaatttgttgtttac |
| | | ctcagaagaggagattgccacaacaaacccacgagacacggacatgtttg |
| | | gacagattgcagataataatcaaaatgccgccaccgcccctcacatcgct |
| | | aacctggacgctatgggaattgttcccggaatggtctggcaaaacagaga |
| | | catctactaccagggccctatttgggccaaggtccctcacacggacggac |
| | | actttcacccttcgccgctgatgggaggatttggactgaaacacccgcct |
| | | ccgcagattttcatcaaaaacacccccgtacccgccaatcccaatactac |
| | | ctttagcgctgcaaggatcaattcttttttgacgcagtacagcaccggac |
| | | aagtcgccgttcagatcgactgggaaattcagaaggagcactccaaacgc |
| | | tggaatcccgaagtccaatttacttcaaactacggcactcaaaattctat |
| | | gctgtgggctcccgacaacgccggcaactaccacgaaccccgggctattg |
| | | ggtcccgtttcctcacccaccacttgtaa |
| 169 | Bba.49 | atggctgctgacggttatcttccagattggctcgaggacaacctctctga |
| | | aggcattcgcgagtggtgggcgctgaaacctggagccccacagcccaagg |
| | | caaatcaacaacatcaagacaacgctcggggtcttgtgcttccgggttac |
| | | aaatacttgggacccggtaacggactcgacaagggagagccggtcaacga |
| | | ggcagacgccgcggccctcgagcacgacaaggcctacgaccagcagctca |
| | | agtcgggagacaacccgtacctcaagtacaaccacgcggacgccgagttt |
| | | caggagcgtcttcaagaagatacgtcttttgggggcaacctcgggcgagc |
| | | agtcttccaggccaaaaagaggattctcgagcctctgggtctggttgaag |
| | | agggcgttaaaacggctcctggaaagaaacgcccattagaaaagactcca |
| | | aatcggccgaccaacccggactctgggaaggccccggccaagaaaaagca |
| | | aaaagacggcgagacagccgactctgctagaaggacactcgactttgaag |
| | | actctggagcaggagacggaccccctgagggatcatcttccggagaaatg |
| | | tctcatgatgctgagatgcgtgcggcgccaggcggaaatgctgtcgaggc |
| | | gggacaaggtgccgatggagtgggtaatgcctccggtgattggcattgcg |
| | | attccacctggtcagagggccgagtcaccaccaccagcacccgaacctgg |
| | | gtcctgcccacctacaacaaccacctgtacctgcgaatcggaacaacggc |
| | | caacagcaacacctacaatggattctccaccccctggggatactttgact |
| | | ttaaccgcttccactgccacttttccccacgcgactggcagcgactcatc |
| | | aacaacaactggggactcaggccgaaatcgatgcgtgttaaaatcttcaa |
| | | catccaggtcaaggaggtcactacgtcaaacggcgagactacggtcgcta |
| | | ataaccttaccagcacggttcagatctttgcggattcaacgtatgaactc |
| | | ccatacgtgatggacgccggtcaggaggggagccttcctccgttccccaa |
| | | cgacgtgtttatggttccccaatacgggtactgcggagtcgtcactggag |
| | | aaaaccagaaccaaacagacagaaatgccttttactgtctggagtacttt |
| | | ccatcccaaatgctaagaactggcaacaactttgaaatcagttaccaatt |
| | | tgaaaaagttcctttccattcaatgtacgcgcacagccagagcctggaca |
| | | gaatgatgaatcctttgctggatcagtacctgtggcatctgcaatcgacc |
| | | actaccggaaattcccttaatcaaggaacagctatcaccacgtacgggaa |
| | | aattaccactggggactttgcctactacaggaaaaactggttgcctggag |
| | | ccggcattaaacaacaaaaattttcaaagaatgccagtcaaaactacaag |
| | | attcccgccagcgggggagacgcccttttaaagtatgacacgcataccac |
| | | tttaaatgggcgatggagtaacatggctcctggtcctccaatggccaccg |
| | | caggtgccggggactcggattttagcaacagccagctgatctttgccgga |
| | | cccaatcagagcggtaacacgaccacgtcttcaaacaatttgttgtttac |
| | | ctcagaagaggagattgccacaacaaacccacgagacacggacatgtttg |
| | | gacagattgcagataataatcaaaatgccaccaccgcccctcacatcgct |
| | | aacctggacgctatgggaattgttcccggaatggtctggcaaaacagaga |
| | | catctactaccagggccctatttgggccaaggtccctcacacggacggac |
| | | actttcacccttcgccgctgatgggaggatttggactgaaacacccgcct |
| | | ccgcagattttcatcaaaaacacccccgtacccgccaatcccaatactac |
| | | ctttagcgctgcaaggatcaattcttttttgacgcagtacagcaccggac |
| | | aagtcgccgttcagatcgactgggaaattcagaaggagcactccaaacgc |
| | | tggaatcccgaagtccaatttacttcaaactacggcactcaaaattctat |
| | | gctgtgggctcccgacaacgccggcaactaccacgaaccccgggctattg |
| | | ggtcccgtttcctcacccaccacttgtaa |
| 170 | Bba.50 | atggctgctgacggttatcttccagattggctcgaggacaacctctctga |
| | | aagcattcgcgagtggtgggcgctgaaacctggagccccacggcccaagg |
| | | caaatcaacaacatcaagacgacgctcggggtcttgtgcttccgggttac |
| | | aaatacttgggacccggtaacggactcgacaagggagagccggtcaacga |
| | | ggcagacgccgcggccctcgagcacgacaaggcctacgaccagcagctca |
| | | agtcgggagacaacccgtacctcaagtacaaccacgcggacgccgagttc |
| | | cagcagcgcttggcgaccgacacctcttttgggggcaacctcggcaaggc |
| | | agtcttccaggccaaaaagaggattctcgagcctctgggtctggttgaag |
| | | agggcgttaaaacggctcctggaaggaaacgcccattagaaaagactcca |
| | | aatcggccgaccaacccggactctgggaaggccccggccaagaaaaagca |
| | | aaaagacggcgagacagccgactctgctagaaggacactcgactttgaag |
| | | actctggagcaggagacggaccccctgagggatcatcttccggagaaatg |
| | | tctcatgatgctgagatgcgtgcggcgccaggcggaaatgctgtcgaggc |
| | | gggacaaggtgccgatggagtgggtaatgcctccggtgattggcattgcg |
| | | attccacctggtcagagggccgagtcaccaccaccagcacccgaacctgg |
| | | gtcctgcccacctacaacaaccacctgtacctgcgaatcggaacaacggc |
| | | caacagcaacacctacaatggattctccaccccctggggatactttgact |
| | | ttaaccgcttccactgccacttttccccacgcgactggcagcgactcatc |
| | | aacaacaactggggactcaggccgaaatcgatgcgtgttaaaatcttcaa |
| | | catccaggtcaaggaggtcactacgtcaaacggcgagactacggtcgcta |
| | | ataaccttaccagcacggttcagatctttgcggattcaacgtatgaactc |
| | | ccatacgtgatggacgccggtcaggaggggagccttcctccgttccccaa |
| | | cgacgtgtttatggttccccaatacgggtactgcggagtcgtcactggag |
| | | aaaaccagaaccaaacagacagaaatgccttttactgtctggagtacttt |
| | | ccatcccaaatgctaagaactggcaacaactttgaaatcagttaccaatt |
| | | tgaaaaagttcctctccattcaatgtacgcgcacagccagagcctggaca |
| | | gaatgatgaatcctttgctggatcagtacctgtggcatctgcaatcgacc |
| | | actaccggaaattcccttaatcaaggaacagctaccaccacgtacgggaa |
| | | aattaccactggggactttgcctactacaggaaaaactggttgcctggag |
| | | cctgcattaaacaacaaaaattttcaaagaatgccagtcaaaactacaag |
| | | attcccgccagcggggaagacgcccttttaaagtatgacacgcataccac |
| | | tttaaatgggcgatggagtaacatggctcctggtcctccaatggccaccg |
| | | caggtgccggggactcggattttagcaacagccagctgatctttgccgga |
| | | cccaatcagagcggtaacacgaccacgtcttcaaacaatttgttgtttac |
| | | ctcagaagaggagattgccacaacaaacccacgagacacggacatgtttg |
| | | gacagattgcagataataatcaaaatgccaccaccgcccctcacatcgct |
| | | aacctggacgctatgggaattgttcccggaatggtctggcaaaacagaga |
| | | catctactaccagggccctatctgggccaaggtccctcacacggacggac |
| | | actttcacccttcgccgctgatgggaggatttggactgaaacacccgcct |
| | | ccgcagattttcatcaaaaacacccccgtacccgccaatcccaatactac |
| | | ctttagcgctgcaaggatcaattcttttttgacgcagtacagcaccggac |
| | | aagtcgccgttcagatcgactgggaaattcagaaggagcactccaaacgc |
| | | tggaatcccgaagtccaatttacttcaaactacggcactcaaaattctat |
| | | gctgtgggctcccgacaacgccggcaactaccacgaaccccgggctattg |
| | | ggtcccgtttcctcacccaccacttgtaa |
| 171 | Bba.51 | atggctgctgacggttatcttccagattggctcgaggacaacctctctga |
| | | aggcattcgcgagtggtgggcgctgaaacctggagccccacagcccaagg |
| | | caaatcaacaacatcaagacaacgctcggggtcttgtgcttccgggttac |
| | | aaatacttgggacccggtaacggactcgacaagggagagccggtcaacga |
| | | ggcagacgccgcggccctcgagcacgacaaggcctacgaccagcagctca |
| | | agtcgggagacaacccgtacctcaagtacaaccacgcggacgccgagttc |
| | | cagcagcgcttggcgaccgacacctcttttgggggcaacctcggcaaggc |
| | | agtcttccaggccaaaaagaggattctcgagcctctgggtctggttgaag |
| | | agggcgttaaaacggctcctggaaagaaacgcccattagaaaagactcca |
| | | aatcggccgaccaacccggactctgggaaggccccggccaagaaaaagca |
| | | aaaagacggcgagacagccgactctgctagaaggacactcgactttgaag |
| | | actctggagcaggagacggaccccctgagggatcatcttccggagaaatg |
| | | tctcatgatgctgagatgcgtgcggcgccaggcggaaatgctgtcgaggc |
| | | gggacaaggtgccgatggagtgggtaatgcctccggtgattggcattgcg |
| | | attccacctggtcagagggccgagtcaccaccaccagcacccgaacctgg |
| | | gtcctgcccacctacaacaaccacctgtacctgcgaatcggaacaacggc |
| | | caacagcaacacctacaatggattctccaccccctggggatactttgact |
| | | ttaaccgcttccactgccacttttccccacgcgactggcagcgactcatc |
| | | aacaacaactggggactcaggccgaaatcgatgcgtgttaaaatcttcaa |
| | | catccaggtcaaggaggtcactacgtcaaacggcgagactacggtcgcta |
| | | ataaccttaccagcacggttcagatctttgcggattcaacgtatgaactc |
| | | ccatacgtgatggacgccggtcaggaggggagccttcctccgttccccaa |
| | | cgacgtgtttatggttccccaatacgggtactgcggagtcgtcactggag |
| | | aaaaccagaaccaaacagacagaaatgccttttactgtctggagtacttt |
| | | ccatcccaaatgctaagaactggcaacaactttgaaatcagttaccaatt |
| | | tgaaaaagttcctttccattcaatgtacgcgcacagccagagcctggaca |
| | | gaatgatgaatcctttgctggatcagtacctgtggcatctgcaatcgacc |
| | | actaccggaaattcccttaatcaaggaacagctaccaccacgtacgggaa |
| | | aattaccactggggactttgcctactacaggaaaaactggttgcctggag |
| | | cctgcattaaacaacaaaaattttcaaagaatgccagtcaaaactacaag |
| | | attcccgccagcgggggagacgcccttttaaagtatgacacgcataccac |
| | | tttaaatgggcgatggagtaacatggctcctggtcctccaatggccaccg |
| | | caggtgccggggactcggattttagcaacagccagctgatctttgccgga |
| | | cccaatcagagcggtaacacgaccacgtcttcaaacaatttgttgtttac |
| | | ctcagaagaggagattgccacaacaaacccacgagacacggacatgtttg |
| | | gacagattgcagataataatcaaaatgccaccaccgcccctcacatcgct |
| | | aacctggacgctatgggaattgttcccggaatggtctggcaaaacagaga |
| | | catctactaccagggccctatttgggccaaggtccctcacacggacggac |
| | | actttcacccttcgccgctgatgggaggatttggactgaaacacccgcct |
| | | ccgcagattttcatcaaaaacacccccgtacccgccaatcccaatactac |
| | | ctttagcgctgcaaggatcaattcttttttgacgcagtacagcaccggac |
| | | aagtcgccgttcagatcgactgggaaattcagaaggagcactccaaacgc |
| | | tggaatcccgaagtccaatttacttcaaactacggcactcaaaattctat |
| | | gctgtgggctcccgacaacgccggcaactaccacgaaccccgggctattg |
| | | ggtcccgtttcctcacccaccacttgtaa |

TABLE 7
Chimeric AAV Capsid Proteins

| SEQ ID | |
|---|---|
| NO. | Sequence |
| 90 | MAADGYLPDWLEDNLSEGIREWWDLKPGAPKPKANQQKQDDGRGLVLPGYKYLGPFNGLDK |
| | GEPVNAADAAALEHDKAYDQQLKAGDNPYLRYNHADAEFQERLQEDTSFGGNLGRAVFQAK |
| | KRVLEPLGLVEEGAKTAPGKKRPVEPSPQRSPDSSTGIGKKGQQPAKKRLNFGQTGDSESV |
| | PDPQPIGEPPAGPSGLGSGTMAAGGGAPMADNNEGADGVGSSSGNWHCDSTWLGDRVITTS |
| | TRTWALPTYNNHLYKQISNGTSGGSTNDNTYFGYSTPWGYFDFNRFHCHFSPRDWQRLINN |
| | NWGFRPKRLNFKLFNIQVKEVTQNEGTKTIANNLTSTIQVFTDSEYQLPYVLGSAHQGCLP |
| | PFPADVFMIPQYGYLTLNNGSQAVGRSSFYCLEYFPSQMLRTGNNFEFSYQFEDVPFHSSY |
| | AHSQSLDRLMNPLIDQYLYYLSKTINGSGQNQQTLKFSVAGPSNMAVQGRNYIPGPSYRQQ |
| | RVSTTVTQNNNSEFAWPGASSWALNGRNSLMNPGPAMASHKEGEDRFFPLSGSLIFGKQGT |
| | GRDNVDADKVMITNEEEIKTTNPVATESYGQVATNHQSAQAQAQTGWVQNQGILPGMVWQN |
| | RDVYLQGPIWAKIPHTDGNFHPSPLMGGFGLKHPPPQILIKNTPVPADPPTTFSQAKLASF |
| | ITQYSTGQVSVEIEWELQKENSKRWNPEIQYTSNYYKSTNVDFAVNTDGTYSEPRPIGTRY |
| | LTRNL |
| 91 | MAADGYLPDWLEDNLSEGIREWWDLKPGAPKPKANQQKQDDGRGLVLPGYKYLGPFNGLDK |
| | GEPVNAADAAALEHDKAYDQQLKAGDNPYLRYNHADAEFQERLQEDTSFGGNLGRAVFQAK |
| | KRVLEPLGLVEEGAKTAPGKKRPVEPSPQRSPDSSTGIGKKGQQPAKKRLNFGQTGDSESV |
| | PDPQPIGEPPAGPSGLGSGTMAAGGGAPMADNNEGADGVGSSSGNWHCDSTWLGDRVITTS |
| | TRTWALPTYNNHLYKQISNSTSGGSSNDNTYFGYSTPWGYFDFNRFHCHFSPRDWQRLINN |
| | NWGFRPKRLNFKLFNIQVKEVTDNNGVKTIANNLTSTIQVFTDSEYQLPYVLGSAHQGCLP |
| | PFPADVFMIPQYGYLTLNDGSQAVGRSSFYCLEYFPSQMLRTGNNFEFSYQFEDVPFHSSY |
| | AHSQSLDRLMNPLIDQYLYYLSRTINGSGQNQQTLKFSVAGPSNMAVQAKNWLPGPCYRQQ |
| | RVSTTVTQNNNSEFAWPGATKYHLNGRDSLVNPGVAMASHKEGEDRFFPLSGSLMFGKQGT |
| | GRDNVDADKVMLTSEEEIKTTNPVATEQYGVVATNHQSAQAQAQTGWVQNQGILPGMVWQN |
| | RDVYLQGPIWAKIPHTDGNFHPSPLMGGFGLKHPPPQILIKNTPVPADPPTTFSQAKLASF |
| | ITQYSTGQVSVEIEWELQKENSKRWNPEIQYTSNYYKSNNVEFAVNTEGTYSEPRPIGTRY |
| | LTRNL |
| 92 | MAADGYLPDWLEDNLSEGIREWWALKPGAPQPKANQQKQDDGRGLVLPGYKYLGPFNGLDK |
| | GEPVNEADAAALEHDKAYDQQLKAGDNPYLRYNHADAEFQERLQEDTSFGGNLGRAVFQAK |
| | KRVLEPLGLVEEAAKTAPGKKRPVDSPDSTSGIGKKGQQPARKRLNFGQTGDAESVPDPQP |
| | IGEPPAAPSGLGSGTMAAGGGAPMADNNEGADGVGNASGNWHCDSTWLGNRVITTSTRTWA |
| | LPTYNNHLYKQISSSSSGATNDNHYFGYSTPWGYFDFNRFHCHFSPRDWQRLINNNWGFRP |
| | KRLRFKLFNIQVKEVTTNDGVTTIANNLTSTVQVFSDSEYQLPYVLGSAHQGCLPPFPADV |
| | FMIPQYGYLTLNNGSQSVGRSSFYCLEYFPSQMLRTGNNFEFSYEFEDVPFHSSYAHSQSL |
| | DRLMNPLIDQYLYYLSKTINGSGQNQQTLKFSVAGPSNMAVQGRNYIPGPSYRQQRVSTTV |
| | TQNNNSEFAWPGASSWALNGRNSLMNPGPAMASHKEGEDRFFPLSGSLIFGKQGTGRDNVD |
| | ADKVMITNEEEIKTTNPVATESYGQVATNHQSAQAQAQTGWVQNQGILPGMVWQNRDVYLQ |
| | GPIWAKIPHTDGNFHPSPLMGGFGLKHPPPQILIKNTPVPANPPETFTPAKFASFITQYST |
| | GQVSVEIEWELQKENSKRWNPEIQYTSNYDKQTGVDFAVDTQGVYSEPRPIGTRYLTRNL |
| 93 | MAADGYLPDWLEDNLSEGIREWWALKPGAPQPKANQQKQDDGRGLVLPGYKYLGPFNGLDK |
| | GEPVNEADAAALEHDKAYDQQLKAGDNPYLRYNHADAEFQERLQEDTSFGGNLGRAVFQAK |
| | KRVLEPLGLVEEAAKTAPGKKRPVDSPDSTSGIGKKGQQPARKRLNFGQTGDAESVPDPQP |
| | IGEPPAAPSGLGSGTMAAGGGAPMADNNEGADGVGNASGNWHCDSTWLGNRVITTSTRTWA |
| | LPTYNNHLYKQISNSTSGGSSNDNHYFGYSTPWGYFDFNRFHCHFSPRDWQRLINNNWGFR |
| | PKRLRFKLFNIQVKEVTDNNGVKTIANNLTSTVQVFSDSEYQLPYVLGSAHQGCLPPFPAD |
| | VFMIPQYGYLTLNDGSQAVGRSSFYCLEYFPSQMLRTGNNFEFSYEFEDVPFHSSYAHSQS |
| | LDRLMNPLIDQYLYYLARTINGSGQNQQTLKFSVAGPSNMAVQSKNWLPGPCFRQQRVSTT |
| | VTQNNNSEFAWPGATKYHLNGRNSLTNPGVPMASHKEGEDRFFPLSGSLVFGKQGTGRDNV |
| | DADKVLMTDEEEIKATNPVATEEYGVVATNHQSAQAQAQTGWVQNQGILPGMVWQNRDVYL |
| | QGPIWAKIPHTDGNFHPSPLMGGFGLKHPPPQILIKNTPVPANPPETFTPAKFASFITQYS |
| | TGQVSVEIEWELQKENSKRWNPEIQYTSNYYKSNNVEFAVNTEGVYSEPRPIGTRYLTRNL |
| 94 | MAADGYLPDWLEDNLSEGIREWWDLKPGAPKPKANQQKQDNGRGLVLPGYKYLGPFNGLDK |
| | GEPVNAADAAALEHDKAYDQQLKAGDNPYLRYNHADAEFQERLQEDTSFGGNLGRAVFQAK |
| | KRVLEPLGLVEEGAKTAPAKKRPVEPSPQRSPDSSTGIGKKGQQPARKRLNFGQTGDSESV |
| | PDPQPLGEPPAAPSSVGSGTVAAGGGAPMADNNEGADGVGNASGNWHCDSTWLGDRVITTS |
| | TRTWALPTYNNHLYKQISNSTSGGSSNDNTYFGYSTPWGYFDFNRFHCHFSPRDWQRLINN |
| | NWGFRPKKLRFKLFNIQVKEVTDNNGVKTIANNLTSTIQVFSDSEYQLPYVLGSAHQGCLP |
| | PFPADVFMIPQYGYLTLNDGSQAVGRSSFYCLEYFPSQMLRTGNNFEFSYSFEDVPFHSSY |
| | AHSQSLDRLMNPLIDQYLYYLARTINGSGQNQQTLKFSVAGPSNMAVQAKNWLPGPCFRQQ |
| | RVSTTVTQNNNSEFAWPGATKYHLNGRNSLVNPGVAMASHKEGEDRFFPLSGSLIFGKQGT |
| | GRDNVDADKLMTNEEEIRPTNPVATEEYGIVATNHQSAQAQAQTGWVQNQGILPGMVWQNR |
| | DVYLQGPIWAKIPHTDGNFHPSPLMGGFGLKHPPPQILIKNTPVPANPPEVFTPAKFASFI |
| | TQYSTGQVSVEIEWELQKENSKRWNPEIQYTSNFYKSNNVEFAVNTEGVYSEPRPIGTRYL |
| | TRNL |
| 95 | MAADGYLPDWLEDNLSEGIREWWDLKPGAPKPKANQQKQDNGRGLVLPGYKYLGPFNGLDK |
| | GEPVNAADAAALEHDKAYDQQLKAGDNPYLRYNHADAEFQERLQEDTSFGGNLGRAVFQAK |
| | KRVLEPLGLVEEGAKTAPAKKRPVEPSPQRSPDSSTGIGKKGQQPARKRLNFGQTGDSESV |
| | PDPQPLGEPPAAPSSVGSGTVAAGGGAPMADNNEGADGVGNASGNWHCDSTWLGDRVITTS |
| | TRTWALPTYNNHLYKQISSETAGSTNDNTYFGYSTPWGYFDFNRFHCHFSPRDWQRLINNN |
| | WGFRPKKLRFKLFNIQVKEVTTNDGVTTIANNLTSTIQVFSDSEYQLPYVLGSAHQGCLPP |
| | FPADVFMIPQYGYLTLNNGSQSVGRSSFYCLEYFPSQMLRTGNNFEFSYSFEDVPFHSSYA |
| | HSQSLDRLMNPLIDQYLYYLSKTINGSGQNQQTLKFSVAGPSNMAVQGRNYIPGPSYRQQR |
| | VSTTVTQNNNSEFAWPGASSWALNGRNSLMNPGPAMASHKEGEDRFFPLSGSLIFGKQGTG |
| | RDNVDADKVMITNEEEIKTTNPVATESYGQVATNHQSAQAQAQTGWVQNQGILPGMVWQNR |
| | DVYLQGPIWAKIPHTDGNFHPSPLMGGFGLKHPPPQILIKNTPVPANPPEVFTPAKFASFI |
| | TQYSTGQVSVEIEWELQKENSKRWNPEIQYTSNFEKQTGVDFAVDSQGVYSEPRPIGTRYL |
| | TRNL |
| 96 | MAADGYLPDWLEDNLSEGIREWWDLKPGAPKPKANQQKQDDGRGLVLPGYKYLGPFNGLDK |
| | GEPVNAADAAALEHDKAYDQQLKAGDNPYLRYNHADAEFQERLQEDTSFGGNLGRAVFQAK |
| | KRVLEPLGLVEEGAKTAPGKKRPVEQSPQEPDSSSGIGKTGQQPAKKRLNFGQTGDSESVP |
| | DPQPLGEPPATPAAVGPTTMASGGGAPMADNNEGADGVGNASGNWHCDSTWLGDRVITTST |
| | RTWALPTYNNHLYKQISNSTSGGSSNDNHYFGYSTPWGYFDFNRFHCHFSPRDWQRLINNN |
| | WGFRPKRLNFKLFNIQVKEVTDNNGVKTIANNLTSTVQVFSDSEYQLPYVLGSAHQGCLPP |
| | FPADVFMIPQYGYLTLNDGSQAVGRSSFYCLEYFPSQMLRTGNNFTFSYTFEDVPFHSSYA |
| | HSQSLDRLMNPLIDQYLYYLNRTINGSGQNQQTLKFSVAGPSNMAVQPKNWLPGPCYRQQR |
| | VSTTVTQNNNSEFAWPGASKYNLNGRESIINPGTAMASHKEGEDRFFPLSGSMIFGKQGTG |
| | RDNVDADKVMITDEEEIKATNPVATERFGTVATNHQSAQAQAQTGWVQNQGILPGMVWQDR |
| | DVYLQGPIWAKIPHTDGHFHPSPLMGGFGLKHPPPQILIKNTPVPANPPAEFSATKFASFI |
| | TQYSTGQVSVEIEWELQKENSKRWNPEVQYTSNYYKSNNVEFAVNTEGLYTEPRPIGTRYL |
| | TRPL |
| 97 | MAADGYLPDWLEDNLSEGIREWWDLKPGAPKPKANQQKQDDGRGLVLPGYKYLGPFNGLDK |
| | GEPVNAADAAALEHDKAYDQQLKAGDNPYLRYNHADAEFQERLQEDTSFGGNLGRAVFQAK |
| | KRVLEPLGLVEEGAKTAPGKKRPVEQSPQEPDSSSGIGKTGQQPAKKRLNFGQTGDSESVP |
| | DPQPLGEPPATPAAVGPTTMASGGGAPMADNNEGADGVGNASGNWHCDSTWLGDRVITTST |
| | RTWALPTYNNHLYKQISSASTGASNDNHYFGYSTPWGYFDFNRFHCHFSPRDWQRLINNNW |
| | GFRPKRLNFKLFNIQVKEVTTNDGVTTIANNLTSTVQVFSDSEYQLPYVLGSAHQGCLPPF |
| | PADVFMIPQYGYLTLNNGSQAVGRSSFYCLEYFPSQMLRTGNNFTFSYTFEDVPFHSSYAH |
| | SQSLDRLMNPLIDQYLYYLSKTINGSGQNQQTLKFSVAGPSNMAVQGRNYIPGPSYRQQRV |
| | STTVTQNNNSEFAWPGASSWALNGRNSLMNPGPAMASHKEGEDRFFPLSGSLIFGKQGTGR |
| | DNVDADKVMITNEEEIKTTNPVATESYGQVATNHQSAQAQAQTGWVQNQGILPGMVWQDRD |
| | VYLQGPIWAKIPHTDGHFHPSPLMGGFGLKHPPPQILIKNTPVPANPPAEFSATKFASFIT |
| | QYSTGQVSVEIEWELQKENSKRWNPEVQYTSNYAKSANVDFTVDNNGLYTEPRPIGTRYLT |
| | RPL |
| 98 | MSFFDWLGKQYAQGAAEFWDLKSGPPAPKKARKDGSAGFNFPGHKYLGPGNSLDRGDPVDA |
| | DDAAAQKHDQSYQEQLEAGDNPYLKYNHADREFQEALKDDTSFEGNLARGLFEAKKLVAEP |
| | LGLVEPELAPPSGRKRPVQSSQESGYSSSQDKRPNLDVDEEDREFAAAAAETETGSAPPTG |
| | NLGPGTMAGGGSAPIDDGSYGADGVGNASGDWHCDSTWLDNCVITRTTRTWNLPTYNNHIY |
| | KRLSSQSGASNDNHSYFGFSTPWGYFDFNRFHCHFSPRDWQRLINNNWGLRPKSLRFKIFN |
| | IQVKEVTQNDGTTTISNNLTSTVQVFADTEYQLPYVIGSAHEGCLPPFPADVFMLPQYGYC |
| | TLNNGSQPTPRSAFYCLEYFPSKMLRTGNSFEFTYNFEKVPFHSMWAHNQSLDRLMNPLID |
| | QYLYYLDVTNTPSGTTTQSRFTYQKGVHTNLPEQERNWLPGPGIRNQRVSKTSADNNNSEY |
| | SWQYSNKYVLENGRASKIAPGPAMASHKDDEEKFFPQSGVLIFGKQGSEKTNVDIEKVMIT |
| | RETEINSTNPLAGGSLGAVSTNLQRGNRQAALDHTNVMGVFPGSVWQDRDIYLQGQIWAKI |
| | PHTDGHFHPSPLMGGFGLKNPPPQILIKNTPVPADPPTEFNANKISSFITQYSTGQVTVEM |
| | EWELQKETSKRWNPEIQYTSNYNKSVNVHFAPDDVGNYKEFRSIGTRYLTRPL |
| 99 | MSFFDWLGKQYAQGAAEFWDLKSGPPAPKKARKDGSAGFNFPGHKYLGPGNSLDRGDPVDA |
| | DDAAAQKHDQSYQEQLEAGDNPYLKYNHADREFQEALKDDTSFEGNLARGLFEAKKLVAEP |
| | LGLVEPELAPPSGRKRPVQSSQESGYSSSQDKRPNLDVDEEDREFAAAAAETETGSAPPTG |
| | NLGPGTMAGGGSAPIDDGSYGADGVGNASGDWHCDSTWLDNCVITRTTRTWNLPTYNNHIY |
| | KRLSSQSGASNDNHSYFGFSTPWGYFDFNRFHCHFSPRDWQRLINNNWGLRPKSLRFKIFN |
| | IQVKEVTQNDGTTTISNNLTSTVQVFADTEYQLPYVIGSAHEGCLPPFPADVFMLPQYGYC |
| | TLNNGSQPTPRSAFYCLEYFPSKMLRTGNSFEFTYNFEDVPFHSSYAHSQSLDRLMNPLID |
| | QYLYYLSRTNTPSGTTTQSRLQFSQAGASDIRDQSRNWLPGPCYRQQRVSKTSADNNNSEY |
| | SWTGATKYHLNGRDSLVNPGPAMASHKDDEEKFFPQSGVLIFGKQGSEKTNVDIEKVMITD |
| | EEEIRTTNPVATEQYGSVSTNLQRGNRQAATADVNTQGVFPGSVWQDRDIYLQGQIWAKIP |
| | HTDGHFHPSPLMGGFGLKNPPPQILIKNTPVPADPPTEFNANKISSFITQYSTGQVTVEME |
| | WELQKETSKRWNPEIQYTSNYNKSVNVHFAPDDVGNYKEFRSIGTRYLTRPL |
| 100 | MSFFDWLGKQYAQGAAEFWDLKSGPPAPKKARKDGSAGFNFPGHKYLGPGNSLDRGDPVDA |
| | DDAAAQKHDQSYQEQLEAGDNPYLKYNHADREFQEALKDDTSFEGNLARGLFEAKKLVAEP |
| | LGLVEPELAPPSGRKRPVQSSQESGYSSSQDKRPNLDVDEEDREFAAAAAETETGSAPPTG |
| | NLGPGTMAGGGSAPIDDGSYGADGVGNASGDWHCDSTWLDNCVITRTTRTWNLPTYNNHIY |
| | KQISNSTSGGSSNDNAYFGFSTPWGYFDFNRFHCHFSPRDWQRLINNNWGLRPKSLRFKIF |
| | NIQVKEVTDNNGVKIISNNLTSTVQVFADTEYQLPYVIGSAHEGCLPPFPADVFMLPQYGY |
| | LTLNDGSQAVGRSSFYCLEYFPSKMLRTGNSFEFTYNFEKVPFHSMWAHNQSLDRLMNPLI |
| | DQYLYYLSKTINGSGQNQQTLKFSVAGPSNMAVQGRNWLPGPGIRQQRVSTTVTQNNNSEF |
| | AWPGASSWALNGRASKIAPGPAMASHKEGEDRFFPLSGSLIFGKQGTGRDNVDADKVNITR |
| | ETEINSTNPLAGGSLGQVATNHQSAQAQAQTGWVQNQGVFPGSVWQDRDIYLQGQIWAKIP |
| | HTDGHFHPSPLMGGFGLKNPPPQILIKNTPVPADPPTEFNANKISSFITQYSTGQVTVEME |
| | WELQKETSKRWNPEIQYTSNYYKSNNVEFAVNTEGVYKEFRSIGTRYLTRPL |
| 101 | MSFFDWLGKQYAQGAAEFWDLKSGPPAPKKARKDGSAGFNFPGHKYLGPGNSLDRGDPVDA |
| | DDAAAQKHDQSYQEQLEAGDNPYLKYNHADREFQEALKDDTSFEGNLARGLFEAKKLVAEP |
| | LGLVEPELAPPSGRKRPVQSSQESGYSSSQDKRPNLDVDEEDREFAAAAAETETGSAPPTG |
| | NLGPGTMAGGGSAPIDDGSYGADGVGNASGDWHCDSTWLDNCVITRTTRTWNLPTYNNHIY |
| | KRLNGTTSGDQSYFGFSTPWGYFDFNRFHCHFSPRDWQRLINNNWGLRPKSLRFKIFNIQV |
| | KEVTTQDSTKIISNNLTSTVQVFADTEYQLPYVIGSAHEGCLPPFPADVFMLPQYGYCTRQ |
| | DGNSNNPTPRSAFYCLEYFPSKMLRTGNSFEFTYNFEKVPFHSMWAHNQSLDRLMNPLIDQ |
| | YLYYLSKTINGSGQNQQTLKFSVAGPSNMAVQGRNYIPGPSYRQQRVSTTVTQNNNSEFAW |
| | PGASSWALNGRNSLMNPGPAMASHKEGEDRFFPLSGSLIFGKQGTGRDNVDADKVMITNEE |
| | EIKTTNPVATESYGQVATNHQSAQAQAQTGWVQNQGVFPGSVWQDRDIYLQGQIWAKIPHT |
| | DGHFHPSPLMGGFGLKNPPPQILIKNTPVPADPPTEFNANKISSFITQYSTGQVTVEMEWE |
| | LQKETSKRWNPEIQYSDDSSSTSGSILHFAPDDVGNYKEFRSIGTRYLTRPL |
| 102 | MSFFDWLGKQYAQGAAEFWDLKSGPPAPKKARKDGSAGFNFPGHKYLGPGNSLDRGDPVDA |
| | DDAAAQKHDQSYQEQLEAGDNPYLKYNHADREFQEALKDDTSFEGNLARGLFEAKKLVAEP |
| | LGLVEPELAPPSGRKRPVQSSQESGYSSSQDKRPNLDVDEEDREFAAAAAETETGSAPPTG |
| | NLGPGTMAGGGSAPIDDGSYGADGVGNASGDWHCDSTWLDNCVITRTTRTWNLPTYNNHIY |
| | KQISNSTSGGSSNDNAYFGFSTPWGYFDFNRFHCHFSPRDWQRLINNNWGLRPKSLRFKIF |
| | NIQVKEVTDNNGVKIISNNLTSTVQVFADTEYQLPYVIGSAHEGCLPPFPADVFMLPQYGY |
| | LTLNDGSQAVGRSSFYCLEYFPSKMLRTGNSFEFTYNFEKVPFHSMWAHNQSLDRLMNPLI |
| | DQYLYYLSKTINGSGQNQQTLKFSVAGPSNMAVQGRNYIPGPSYRQQRVSTTVTQNNNSEF |
| | AWPGASSWALNGRNSLMNPGPAMASHKEGEDRFFPLSGSLIFGKQGTGRDNVDADKVMITN |
| | EEEIKTTNPVATESYGQVATNHQSAQAQAQTGWVQNQGVFPGSVWQDRDIYLQGQIWAKIP |
| | HTDGHFHPSPLMGGFGLKNPPPQILIKNTPVPADPPTEFNANKISSFITQYSTGQVTVEME |
| | WELQKETSKRWNPEIQYTSNYYKSNNVEFAVNTEGVYKEFRSIGTRYLTRPL |
| 103 | MSFFDWLGKQYAQGAAEFWDLKSGPPAPKKARKDGSAGFNFPGHKYLGPGNSLDRGDPVDA |
| | DDAAAQKHDQSYQEQLEAGDNPYLKYNHADREFQEALKDDTSFEGNLARGLFEAKKLVAEP |
| | LGLVEPELAPPSGRKRPVQSSQESGYSSSQDKRPNLDVDEEDREFAAAAAETETGSAPPTG |
| | NLGPGTMAGGGSAPIDDGSYGADGVGNASGDWHCDSTWLDNCVITRTTRTWNLPTYNNHIY |
| | KQISNGTSGGATNDNTYFGFSTPWGYFDFNRFHCHFSPRDWQRLINNNWGLRPKSLRFKIF |
| | NIQVKEVTQNEGTKIISNNLTSTVQVFADTEYQLPYVIGSAHEGCLPPFPADVFMLPQYGY |
| | LTLNNGSQAVGRSSFYCLEYFPSKMLRTGNSFEFTYNFEKVPFHSMWAHNQSLDRLMNPLI |
| | DQYLYYLSRTQTTGGTANTQTLGFSQGGPNTMANQAKNWLPGPGIRQQRVSTTTGQNNNSN |
| | FAWTAGTKYHLNGRASKIAPGPAMATHKDDEERFFPSNGILIFGKQNAARDNADYSDVNIT |
| | RETEINSTNPLAGGSLGIVADNLQQQNTAPQIGTVNSQGVFPGSVWQDRDIYLQGQIWAKI |
| | PHTDGHFHPSPLMGGFGLKNPPPQILIKNTPVPADPPTEFNANKISSFITQYSTGQVTVEM |
| | EWELQKETSKRWNPEIQYTSNYYKSTSVDFAVNTEGVYKEFRSIGTRYLTRPL |
| 104 | MSFFDWLGKQYAQGAAEFWDLKSGPPAPKKARKDGSAGFNFPGHKYLGPGNSLDRGDPVDA |
| | DDAAAQKHDQSYQEQLEAGDNPYLKYNHADREFQEALKDDTSFEGNLARGLFEAKKLVAEP |
| | LGLVEPELAPPSGRKRPVQSSQESGYSSSQDKRPNLDVDEEDREFAAAAAETETGSAPPTG |
| | NLGPGTMAGGGSAPIDDGSYGADGVGNASGDWHCDSTWLDNCVITRTTRTWNLPTYNNHIY |
| | KRLNGTTSGDQSYFGFSTPWGYFDFNRFHCHFSPRDWQRLINNNWGLRPKSLRFKIFNIQV |
| | KEVTTQDSTKIISNNLTSTVQVFADTEYQLPYVIGSAHEGCLPPFPADVFMLPQYGYCTRQ |
| | DGNSNNPTPRSAFYCLEYFPSKMLRTGNSFEFTYNFEKVPFHSMWAHNQSLDRLMNPLIDQ |
| | YLYYLSRTQTTGGTANTQTLGFSQGGPNTMANQAKNWLPGPCYRQQRVSTTTGQNNNSNFA |
| | WTAGTKYHLNGRNSLANPGIAMATHKDDEERFFPSNGILIFGKQNAARDNADYSDVMLTSE |
| | EEIKTTNPVATEEYGIVADNLQQQNTAPQIGTVNSQGVFPGSVWQDRDIYLQGQIWAKIPH |
| | TDGHFHPSPLMGGFGLKNPPPQILIKNTPVPADPPTEFNANKISSFITQYSTGQVTVEMEW |
| | ELQKETSKRWNPEIQYSDDSSSTSGSILHFAPDDVGNYKEFRSIGTRYLTRPL |
| 105 | MSFFDWLGKQYAQGAAEFWDLKSGPPAPKKARKDGSAGFNFPGHKYLGPGNSLDRGDPVDA |
| | DDAAAQKHDQSYQEQLEAGDNPYLKYNHADREFQEALKDDTSFEGNLARGLFEAKKLVAEP |
| | LGLVEPELAPPSGRKRPVQSSQESGYSSSQDKRPNLDVDEEDREFAAAAAETETGSAPPTG |
| | NLGPGTMAGGGSAPIDDGSYGADGVGNASGDWHCDSTWLDNCVITRTTRTWNLPTYNNHIY |
| | KQISNGTSGGATNDNTYFGFSTPWGYFDFNRFHCHFSPRDWQRLINNNWGLRPKSLRFKIF |
| | NIQVKEVTQNEGTKIISNNLTSTVQVFADTEYQLPYVIGSAHEGCLPPFPADVFMLPQYGY |
| | LTLNNGSQAVGRSSFYCLEYFPSKMLRTGNSFEFTYNFEKVPFHSMWAHNQSLDRLMNPLI |
| | DQYLYYLSRTQTTGGTANTQTLGFSQGGPNTMANQAKNWLPGPCYRQQRVSTTTGQNNNSN |
| | FAWTAGTKYHLNGRNSLANPGIAMATHKDDEERFFPSNGILIFGKQNAARDNADYSDVMLT |
| | SEEEIKTTNPVATEEYGIVADNLQQQNTAPQIGTVNSQGVFPGSVWQDRDIYLQGQIWAKI |
| | PHTDGHFHPSPLMGGFGLKNPPPQILIKNTPVPADPPTEFNANKISSFITQYSTGQVTVEM |
| | EWELQKETSKRWNPEIQYTSNYYKSTSVDFAVNTEGVYKEFRSIGTRYLTRPL |
| 106 | MTDGYLPDWLEDNLSEGVREWWALQPGAPKPKANQQHQDNARGLVLPGYKYLGPGNGLDKG |
| | EPVNAADAAALEHDKAYDQQLKAGDNPYLKYNHADAEFQQRLQGDTSFGGNLGRAVFQAKK |
| | RVLEPLGLVEQAGETAPGKKRPLIESPQQPDSSTGIGKKGKQPAKKKLVFEDETGAGDGPP |
| | EGSTSGAMSDDSEMRAAAGGAAVEGGQGADGVGNASGDWHCDSTWSEGHVTTTSTRTWVLP |
| | TYNNHLYKQISSQSGASNDNHYFGFSTPWGYFDFNRFHCHFSPRDWQRLINNNWGMRPKAM |
| | RVKIFNIQVKEVTQNDGTTTVANNLTSTVQIFADSSYELPYVMDAGQEGSLPPFPNDVFMV |
| | PQYGYLTLNNGSQAVGRSSFYCLEYFPSQMLRTGNNFEITYSFEKVPFHSMYAHSQSLDRL |
| | MNPLIDQYLYYLSRTNTPSGTTTQSRLQFSQAGASDIRDQSRNWLPGPSIRQQRVSKTSAD |
| | NNNSEYSWTGATKYHLNGRWSALTPGPPMATHKDDEEKFFPQSGVLIFGKQGSEKTNVDIE |
| | KLIFTSEEELAATNATDTDMWGSVSTNLQRGNRQAATADVNTQGAVPGMVWQNRDIYYQGP |
| | IWAKIPHTDGHFHPSPLIGGFGLKHPPPQIFIKNTPVPANPATTFSSTPVNSFITQYSTGQ |
| | VSVQIDWEIQKERSKRWNPEVQFTSNYNKSVNVDFTVDTNGVYTEPRAIGTRYLTHHL |
| 107 | MTDGYLPDWLEDNLSEGVREWWALQPGAPKPKANQQHQDNARGLVLPGYKYLGPGNGLDKG |
| | EPVNAADAAALEHDKAYDQQLKAGDNPYLKYNHADAEFQQRLQGDTSFGGNLGRAVFQAKK |
| | RVLEPLGLVEQAGETAPGKKRPLIESPQQPDSSTGIGKKGKQPAKKKLVFEDETGAGDGPP |
| | EGSTSGAMSDDSEMRAAAGGAAVEGGQGADGVGNASGDWHCDSTWSEGHVTTTSTRTWVLP |
| | TYNNHLYKRLGESLQSNTYNGFSTPWGYFDFNRFHCHFSPRDWQRLINNNWGMRPKAMRVK |
| | IFNIQVKEVTTSNGETTVANNLTSTVQIFADSSYELPYVMDAGQEGSLPPFPNDVFMVPQY |
| | GYCGLVTGNTSQQQTDRNAFYCLEYFPSQMLRTGNNFEITYSFEKVPFHSMYAHSQSLDRL |
| | MNPLIDQYLYYLSRTNTPSGTTTQSRLQFSQAGASDIRDQSRNWLPGPCYRQQRVSKTSAD |
| | NNNSEYSWTGATKYHLNGRDSLVNPGPAMASHKDDEEKFFPQSGVLIFGKQGSEKTNVDIE |
| | KVMITDEEEIRTTNPVATEQYGSVSTNLQRGNRQAATADVNTQGAVPGMVWQNRDIYYQGP |
| | IWAKIPHTDGHFHPSPLIGGFGLKHPPPQIFIKNTPVPANPATTFSSTPVNSFITQYSTGQ |
| | VSVQIDWEIQKERSKRWNPEVQFTSNYGQQNSLLWAPDAAGKYTEPRAIGTRYLTHHL |
| 108 | MTDGYLPDWLEDNLSEGVREWWALQPGAPKPKANQQHQDNARGLVLPGYKYLGPGNGLDKG |
| | EPVNAADAAALEHDKAYDQQLKAGDNPYLKYNHADAEFQQRLQGDTSFGGNLGRAVFQAKK |
| | RVLEPLGLVEQAGETAPGKKRPLIESPQQPDSSTGIGKKGKQPAKKKLVFEDETGAGDGPP |
| | EGSTSGAMSDDSEMRAAAGGAAVEGGQGADGVGNASGDWHCDSTWSEGHVTTTSTRTWVLP |
| | TYNNHLYKQISSQSGASNDNHYFGFSTPWGYFDFNRFHCHFSPRDWQRLINNNWGMRPKAM |
| | RVKIFNIQVKEVTQNDGTTTVANNLTSTVQIFADSSYELPYVMDAGQEGSLPPFPNDVFMV |
| | PQYGYLTLNNGSQAVGRSSFYCLEYFPSQMLRTGNNFEITYSFEKVPFHSMYAHSQSLDRL |
| | MNPLIDQYLYYLSRTNTPSGTTTQSRLQFSQAGASDIRDQSRNWLPGPCYRQQRVSKTSAD |
| | NNNSEYSWTGATKYHLNGRDSLVNPGPAMASHKDDEEKFFPQSGVLIFGKQGSEKTNVDIE |
| | KVMITDEEEIRTTNPVATEQYGSVSTNLQRGNRQAATADVNTQGAVPGMVWQNRDIYYQGP |
| | IWAKIPHTDGHFHPSPLIGGFGLKHPPPQIFIKNTPVPANPATTFSSTPVNSFITQYSTGQ |
| | VSVQIDWEIQKERSKRWNPEVQFTSNYNKSVNVDFTVDTNGVYTEPRAIGTRYLTHHL |
| 109 | MTDGYLPDWLEDNLSEGVREWWALQPGAPKPKANQQHQDNARGLVLPGYKYLGPGNGLDKG |
| | EPVNAADAAALEHDKAYDQQLKAGDNPYLKYNHADAEFQQRLQGDTSFGGNLGRAVFQAKK |
| | RVLEPLGLVEQAGETAPGKKRPLIESPQQPDSSTGIGKKGKQPAKKKLVFEDETGAGDGPP |
| | EGSTSGAMSDDSEMRAAAGGAAVEGGQGADGVGNASGDWHCDSTWSEGHVTTTSTRTWVLP |
| | TYNNHLYKQISNGTSGGATNDNTYFGFSTPWGYFDFNRFHCHFSPRDWQRLINNNWGMRPK |
| | AMRVKIFNIQVKEVTQNEGTKTVANNLTSTVQIFADSSYELPYVMDAGQEGSLPPFPNDVF |
| | MVPQYGYLTLNNGSQAVGRSSFYCLEYFPSQMLRTGNNFEITYSFEKVPFHSMYAHSQSLD |
| | RLMNPLIDQYLYYLSRTQTTGGTANTQTLGFSQGGPNTMANQAKNWLPGPSIRQQRVSTTT |
| | GQNNNSNFAWTAGTKYHLNGRWSALTPGPPMATHKDDEERFFPSNGILIFGKQNAARDNAD |
| | YSDLIFTSEEELAATNATDTDMWGIVADNLQQQNTAPQIGTVNSQGAVPGMVWQNRDIYYQ |
| | GPIWAKIPHTDGHFHPSPLIGGFGLKHPPPQIFIKNTPVPANPATTFSSTPVNSFITQYST |
| | GQVSVQIDWEIQKERSKRWNPEVQFTSNYYKSTSVDFAVNTEGVYTEPRAIGTRYLTHHL |
| 110 | MTDGYLPDWLEDNLSEGVREWWALQPGAPKPKANQQHQDNARGLVLPGYKYLGPGNGLDKG |
| | EPVNAADAAALEHDKAYDQQLKAGDNPYLKYNHADAEFQQRLQGDTSFGGNLGRAVFQAKK |
| | RVLEPLGLVEQAGETAPGKKRPLIESPQQPDSSTGIGKKGKQPAKKKLVFEDETGAGDGPP |
| | EGSTSGAMSDDSEMRAAAGGAAVEGGQGADGVGNASGDWHCDSTWSEGHVTTTSTRTWVLP |
| | TYNNHLYKRLGESLQSNTYNGFSTPWGYFDFNRFHCHFSPRDWQRLINNNWGMRPKAMRVK |
| | IFNIQVKEVTTSNGETTVANNLTSTVQIFADSSYELPYVMDAGQEGSLPPFPNDVFMVPQY |
| | GYCGLVTGNTSQQQTDRNAFYCLEYFPSQMLRTGNNFEITYSFEKVPFHSMYAHSQSLDRL |
| | MNPLIDQYLYYLSRTQTTGGTANTQTLGFSQGGPNTMANQAKNWLPGPCYRQQRVSTTTGQ |
| | NNNSNFAWTAGTKYHLNGRNSLANPGIAMATHKDDEERFFPSNGILIFGKQNAARDNADYS |
| | DVMLTSEEEIKTTNPVATEEYGIVADNLQQQNTAPQIGTVNSQGAVPGMVWQNRDIYYQGP |
| | IWAKIPHTDGHFHPSPLIGGFGLKHPPPQIFIKNTPVPANPATTFSSTPVNSFITQYSTGQ |
| | VSVQIDWEIQKERSKRWNPEVQFTSNYGQQNSLLWAPDAAGKYTEPRAIGTRYLTHHL |
| 111 | MTDGYLPDWLEDNLSEGVREWWALQPGAPKPKANQQHQDNARGLVLPGYKYLGPGNGLDKG |
| | EPVNAADAAALEHDKAYDQQLKAGDNPYLKYNHADAEFQQRLQGDTSFGGNLGRAVFQAKK |
| | RVLEPLGLVEQAGETAPGKKRPLIESPQQPDSSTGIGKKGKQPAKKKLVFEDETGAGDGPP |
| | EGSTSGAMSDDSEMRAAAGGAAVEGGQGADGVGNASGDWHCDSTWSEGHVTTTSTRTWVLP |
| | TYNNHLYKQISNGTSGGATNDNTYFGFSTPWGYFDFNRFHCHFSPRDWQRLINNNWGMRPK |
| | AMRVKIFNIQVKEVTQNEGTKTVANNLTSTVQIFADSSYELPYVMDAGQEGSLPPFPNDVF |
| | MVPQYGYLTLNNGSQAVGRSSFYCLEYFPSQMLRTGNNFEITYSFEKVPFHSMYAHSQSLD |
| | RLMNPLIDQYLYYLSRTQTTGGTANTQTLGFSQGGPNTMANQAKNWLPGPCYRQQRVSTTT |
| | GQNNNSNFAWTAGTKYHLNGRNSLANPGIAMATHKDDEERFFPSNGILIFGKQNAARDNAD |
| | YSDVMLTSEEEIKTTNPVATEEYGIVADNLQQQNTAPQIGTVNSQGAVPGMVWQNRDIYYQ |
| | GPIWAKIPHTDGHFHPSPLIGGFGLKHPPPQIFIKNTPVPANPATTFSSTPVNSFITQYST |
| | GQVSVQIDWEIQKERSKRWNPEVQFTSNYYKSTSVDFAVNTEGVYTEPRAIGTRYLTHHL |
| 112 | MTDGYLPDWLEDNLSEGVREWWALQPGAPKPKANQQHQDNARGLVLPGYKYLGPGNGLDKG |
| | EPVNAADAAALEHDKAYDQQLKAGDNPYLKYNHADAEFQQRLQGDTSFGGNLGRAVFQAKK |
| | RVLEPLGLVEQAGETAPGKKRPLIESPQQPDSSTGIGKKGKQPAKKKLVFEDETGAGDGPP |
| | EGSTSGAMSDDSEMRAAAGGAAVEGGQGADGVGNASGDWHCDSTWSEGHVTTTSTRTWVLP |
| | TYNNHLYKQISNSTSGGSSNDNAYFGFSTPWGYFDFNRFHCHFSPRDWQRLINNNWGMRPK |
| | AMRVKIFNIQVKEVTDNNGVKTVANNLTSTVQIFADSSYELPYVMDAGQEGSLPPFPNDVF |
| | MVPQYGYLTLNDGSQAVGRSSFYCLEYFPSQMLRTGNNFEITYSFEKVPFHSMYAHSQSLD |
| | RLMNPLIDQYLYYLSKTINGSGQNQQTLKFSVAGPSNMAVQGRNWLPGPSIRQQRVSTTVT |
| | QNNNSEFAWPGASSWALNGRWSALTPGPPMATHKEGEDRFFPLSGSLIFGKQGTGRDNVDA |
| | DKLIFTSEEELAATNATDTDMWGQVATNHQSAQAQAQTGWVQNQGAVPGMVWQNRDIYYQG |
| | PIWAKIPHTDGHFHPSPLIGGFGLKHPPPQIFIKNTPVPANPATTFSSTPVNSFITQYSTG |
| | QVSVQIDWEIQKERSKRWNPEVQFTSNYYKSTSVDFAVNTEGVYTEPRAIGTRYLTHHL |
| 113 | MTDGYLPDWLEDNLSEGVREWWALQPGAPKPKANQQHQDNARGLVLPGYKYLGPGNGLDKG |
| | EPVNAADAAALEHDKAYDQQLKAGDNPYLKYNHADAEFQQRLQGDTSFGGNLGRAVFQAKK |
| | RVLEPLGLVEQAGETAPGKKRPLIESPQQPDSSTGIGKKGKQPAKKKLVFEDETGAGDGPP |
| | EGSTSGAMSDDSEMRAAAGGAAVEGGQGADGVGNASGDWHCDSTWSEGHVTTTSTRTWVLP |
| | TYNNHLYKRLGESLQSNTYNGFSTPWGYFDFNRFHCHFSPRDWQRLINNNWGMRPKAMRVK |
| | IFNIQVKEVTTSNGETTVANNLTSTVQIFADSSYELPYVMDAGQEGSLPPFPNDVFMVPQY |
| | GYCGLVTGNTSQQQTDRNAFYCLEYFPSQMLRTGNNFEITYSFEKVPFHSMYAHSQSLDRL |
| | MNPLIDQYLYYLSKTINGSGQNQQTLKFSVAGPSNMAVQGRNYIPGPSYRQQRVSTTVTQN |
| | NNSEFAWPGASSWALNGRNSLMNPGPAMASHKEGEDRFFPLSGSLIFGKQGTGRDNVDADK |
| | VMITNEEEIKTTNPVATESYGQVATNHQSAQAQAQTGWVQNQGAVPGMVWQNRDIYYQGPI |
| | WAKIPHTDGHFHPSPLIGGFGLKHPPPQIFIKNTPVPANPATTFSSTPVNSFITQYSTGQV |
| | SVQIDWEIQKERSKRWNPEVQFTSNYGQQNSLLWAPDAAGKYTEPRAIGTRYLTHHL |
| 114 | MTDGYLPDWLEDNLSEGVREWWALQPGAPKPKANQQHQDNARGLVLPGYKYLGPGNGLDKG |
| | EPVNAADAAALEHDKAYDQQLKAGDNPYLKYNHADAEFQQRLQGDTSFGGNLGRAVFQAKK |
| | RVLEPLGLVEQAGETAPGKKRPLIESPQQPDSSTGIGKKGKQPAKKKLVFEDETGAGDGPP |
| | EGSTSGAMSDDSEMRAAAGGAAVEGGQGADGVGNASGDWHCDSTWSEGHVTTTSTRTWVLP |
| | TYNNHLYKQISNSTSGGSSNDNAYFGFSTPWGYFDFNRFHCHFSPRDWQRLINNNWGMRPK |
| | AMRVKIFNIQVKEVTDNNGVKTVANNLTSTVQIFADSSYELPYVMDAGQEGSLPPFPNDVF |
| | MVPQYGYLTLNDGSQAVGRSSFYCLEYFPSQMLRTGNNFEITYSFEKVPFHSMYAHSQSLD |
| | RLMNPLIDQYLYYLSKTINGSGQNQQTLKFSVAGPSNMAVQGRNYIPGPSYRQQRVSTTVT |
| | QNNNSEFAWPGASSWALNGRNSLMNPGPAMASHKEGEDRFFPLSGSLIFGKQGTGRDNVDA |
| | DKVMITNEEEIKTTNPVATESYGQVATNHQSAQAQAQTGWVQNQGAVPGMVWQNRDIYYQG |
| | PIWAKIPHTDGHFHPSPLIGGFGLKHPPPQIFIKNTPVPANPATTFSSTPVNSFITQYSTG |
| | QVSVQIDWEIQKERSKRWNPEVQFTSNYYKSNNVEFAVNTEGVYTEPRAIGTRYLTHHL |
| 115 | MSFVDHPPDWLESIGDGFREFLGLEAGPPKPKANQQKQDNARGLVLPGYKYLGPGNGLDKG |
| | DPVNFADEVAREHDLSYQKQLEAGDNPYLKYNHADAEFQEKLASDTSFGGNLGKAVFQAKK |
| | RILEPLGLVETPDKTAPAAKKRPLEQSPQEPDSSSGVGKKGKQPARKRLNFDDEPGAGDGP |
| | PPEGPSSGAMSTETEMRAAAGGNGGDAGQGAEGVGNASGDWHCDSTWSESHVTTTSTRTWV |
| | LPTYNNHLYLQISNSTSGGSSNDNAYFGFSTPWGYFDFNRFHCHFSPRDWQRLINNHWGLR |
| | PKSMQVRIFNIQVKEVTDNNGVKSNNLTSTVQIFADSTYELPYVMDAGQEGSLPPFPNDVF |
| | MVPQYGYLTLNDGSQAVGRSSFYCLEYFPSQMLRTGNNFEMVYKFENVPFHSMYAHSQSLD |
| | RLMNPLLDQYLYYLSKTINGSGQNQQTLKFSVAGPSNMAVQGRNWLPGPMMRQQRVSTTVT |
| | QNNNSEFAWPGASSWALNGRWSNFAPGTAMATHKEGEDRFFPLSGSLIFGKQGTGRDNVDA |
| | DKLMFTSEDELRATNPRDTDLFGQVATNHQSAQAQAQTGWVQNQGVYPGMVWQDRDIYYQG |
| | PIWAKIPHTDGHFHPSPLIGGFGLKSPPPQIFIKNTPVPANPATTFSPARINSFITQYSTG |
| | QVAVKIEWEIQKERSKRWNPEVQFTSNYYKSNNVEFAVNTEGVYKEPRAIGSRYLTNHL |
| 116 | MSFVDHPPDWLESIGDGFREFLGLEAGPPKPKANQQKQDNARGLVLPGYKYLGPGNGLDKG |
| | DPVNFADEVAREHDLSYQKQLEAGDNPYLKYNHADAEFQEKLASDTSFGGNLGKAVFQAKK |
| | RILEPLGLVETPDKTAPAAKKRPLEQSPQEPDSSSGVGKKGKQPARKRLNFDDEPGAGDGP |
| | PPEGPSSGAMSTETEMRAAAGGNGGDAGQGAEGVGNASGDWHCDSTWSESHVTTTSTRTWV |
| | LPTYNNHLYLRLGSSNASDTFNGFSTPWGYFDFNRFHCHFSPRDWQRLINNHWGLRPKSMQ |
| | VRIFNIQVKEVTTSNGETTVSNNLTSTVQIFADSTYELPYVMDAGQEGSLPPFPNDVFMVP |
| | QYGYCGLVTGGSSQNQTDRNAFYCLEYFPSQMLRTGNNFEMVYKFENVPFHSMYAHSQSLD |
| | RLMNPLLDQYLYYLSKTINGSGQNQQTLKFSVAGPSNMAVQGRNYIPGPSYRQQRVSTTVT |
| | QNNNSEFAWPGASSWALNGRNSLMNPGPAMASHKEGEDRFFPLSGSLIFGKQGTGRDNVDA |
| | DKVMITNEEEIKTTNPVATESYGQVATNHQSAQAQAQTGWVQNQGVYPGMVWQDRDIYYQG |
| | PIWAKIPHTDGHFHPSPLIGGFGLKSPPPQIFIKNTPVPANPATTFSPARINSFITQYSTG |
| | QVAVKIEWEIQKERSKRWNPEVQFTSNYGAQDSLLWAPDNAGAYKEPRAIGSRYLTNHL |
| 117 | MSFVDHPPDWLESIGDGFREFLGLEAGPPKPKANQQKQDNARGLVLPGYKYLGPGNGLDKG |
| | DPVNFADEVAREHDLSYQKQLEAGDNPYLKYNHADAEFQEKLASDTSFGGNLGKAVFQAKK |
| | RILEPLGLVETPDKTAPAAKKRPLEQSPQEPDSSSGVGKKGKQPARKRLNFDDEPGAGDGP |
| | PPEGPSSGAMSTETEMRAAAGGNGGDAGQGAEGVGNASGDWHCDSTWSESHVTTTSTRTWV |
| | LPTYNNHLYLQISNSTSGGSSNDNAYFGFSTPWGYFDFNRFHCHFSPRDWQRLINNHWGLR |
| | PKSMQVRIFNIQVKEVTDNNGVKSNNLTSTVQIFADSTYELPYVMDAGQEGSLPPFPNDVF |
| | MVPQYGYLTLNDGSQAVGRSSFYCLEYFPSQMLRTGNNFEMVYKFENVPFHSMYAHSQSLD |
| | RLMNPLLDQYLYYLSKTINGSGQNQQTLKFSVAGPSNMAVQGRNYIPGPSYRQQRVSTTVT |
| | QNNNSEFAWPGASSWALNGRNSLMNPGPAMASHKEGEDRFFPLSGSLIFGKQGTGRDNVDA |
| | DKVMITNEEEIKTTNPVATESYGQVATNHQSAQAQAQTGWVQNQGVYPGMVWQDRDIYYQG |
| | PIWAKIPHTDGHFHPSPLIGGFGLKSPPPQIFIKNTPVPANPATTFSPARINSFITQYSTG |
| | QVAVKIEWEIQKERSKRWNPEVQFTSNYYKSNNVEFAVNTEGVYKEPRAIGSRYLTNHL |
| 118 | MSFVDHPPDWLESIGDGFREFLGLEAGPPKPKANQQKQDNARGLVLPGYKYLGPGNGLDKG |
| | DPVNFADEVAREHDLSYQKQLEAGDNPYLKYNHADAEFQEKLASDTSFGGNLGKAVFQAKK |
| | RILEPLGLVETPDKTAPAAKKRPLEQSPQEPDSSSGVGKKGKQPARKRLNFDDEPGAGDGP |
| | PPEGPSSGAMSTETEMRAAAGGNGGDAGQGAEGVGNASGDWHCDSTWSESHVTTTSTRTWV |
| | LPTYNNHLYLQISNGTSGGATNDNTYFGFSTPWGYFDFNRFHCHFSPRDWQRLINNHWGLR |
| | PKSMQVRIFNIQVKEVTQNEGTKSNNLTSTVQIFADSTYELPYVMDAGQEGSLPPFPNDVF |
| | MVPQYGYLTLNNGSQAVGRSSFYCLEYFPSQMLRTGNNFEMVYKFENVPFHSMYAHSQSLD |
| | RLMNPLLDQYLYYLSRTQTTGGTANTQTLGFSQGGPNTMANQAKNWLPGPMMRQQRVSTTT |
| | GQNNNSNFAWTAGTKYHLNGRWSNFAPGTAMATHKDDEERFFPSNGILIFGKQNAARDNAD |
| | YSDLMFTSEDELRATNPRDTDLFGIVADNLQQQNTAPQIGTVNSQGVYPGMVWQDRDIYYQ |
| | GPIWAKIPHTDGHFHPSPLIGGFGLKSPPPQIFIKNTPVPANPATTFSPARINSFITQYST |
| | GQVAVKIEWEIQKERSKRWNPEVQFTSNYYKSTSVDFAVNTEGVYKEPRAIGSRYLTNHL |
| 119 | MSFVDHPPDWLESIGDGFREFLGLEAGPPKPKANQQKQDNARGLVLPGYKYLGPGNGLDKG |
| | DPVNFADEVAREHDLSYQKQLEAGDNPYLKYNHADAEFQEKLASDTSFGGNLGKAVFQAKK |
| | RILEPLGLVETPDKTAPAAKKRPLEQSPQEPDSSSGVGKKGKQPARKRLNFDDEPGAGDGP |
| | PPEGPSSGAMSTETEMRAAAGGNGGDAGQGAEGVGNASGDWHCDSTWSESHVTTTSTRTWV |
| | LPTYNNHLYLRLGSSNASDTFNGFSTPWGYFDFNRFHCHFSPRDWQRLINNHWGLRPKSMQ |
| | VRIFNIQVKEVTTSNGETTVSNNLTSTVQIFADSTYELPYVMDAGQEGSLPPFPNDVFMVP |
| | QYGYCGLVTGGSSQNQTDRNAFYCLEYFPSQMLRTGNNFEMVYKFENVPFHSMYAHSQSLD |
| | RLMNPLLDQYLYYLSRTQTTGGTANTQTLGFSQGGPNTMANQAKNWLPGPCYRQQRVSTTT |
| | GQNNNSNFAWTAGTKYHLNGRNSLANPGIAMATHKDDEERFFPSNGILIFGKQNAARDNAD |
| | YSDVMLTSEEEIKTTNPVATEEYGIVADNLQQQNTAPQIGTVNSQGVYPGMVWQDRDIYYQ |
| | GPIWAKIPHTDGHFHPSPLIGGFGLKSPPPQIFIKNTPVPANPATTFSPARINSFITQYST |
| | GQVAVKIEWEIQKERSKRWNPEVQFTSNYGAQDSLLWAPDNAGAYKEPRAIGSRYLTNHL |
| 120 | MSFVDHPPDWLESIGDGFREFLGLEAGPPKPKANQQKQDNARGLVLPGYKYLGPGNGLDKG |
| | DPVNFADEVAREHDLSYQKQLEAGDNPYLKYNHADAEFQEKLASDTSFGGNLGKAVFQAKK |
| | RILEPLGLVETPDKTAPAAKKRPLEQSPQEPDSSSGVGKKGKQPARKRLNFDDEPGAGDGP |
| | PPEGPSSGAMSTETEMRAAAGGNGGDAGQGAEGVGNASGDWHCDSTWSESHVTTTSTRTWV |
| | LPTYNNHLYLQISNGTSGGATNDNTYFGFSTPWGYFDFNRFHCHFSPRDWQRLINNHWGLR |
| | PKSMQVRIFNIQVKEVTQNEGTKSNNLTSTVQIFADSTYELPYVMDAGQEGSLPPFPNDVF |
| | MVPQYGYLTLNNGSQAVGRSSFYCLEYFPSQMLRTGNNFEMVYKFENVPFHSMYAHSQSLD |
| | RLMNPLLDQYLYYLSRTQTTGGTANTQTLGFSQGGPNTMANQAKNWLPGPCYRQQRVSTTT |
| | GQNNNSNFAWTAGTKYHLNGRNSLANPGIAMATHKDDEERFFPSNGILIFGKQNAARDNAD |
| | YSDVMLTSEEEIKTTNPVATEEYGIVADNLQQQNTAPQIGTVNSQGVYPGMVWQDRDIYYQ |
| | GPIWAKIPHTDGHFHPSPLIGGFGLKSPPPQIFIKNTPVPANPATTFSPARINSFITQYST |
| | GQVAVKIEWEIQKERSKRWNPEVQFTSNYYKSTSVDFAVNTEGVYKEPRAIGSRYLTNHL |
| 121 | MAADGYLPDWLEDNLSEGIREWWALKPGAPKPKANQQKQDDGRGLVLPGYKYLGPFNGLDK |
| | GEPVNAADAAALEHDKAYDQQLQAGDNPYLRYNHADAEFQERLQEDTSFGGNLGRAVFQAK |
| | KRVLEPLGLVEEGAKTAPGKKRPVEPSPQRSPDSSTGIGKKGQQPARKRLNFGQTGDSESV |
| | PDPQPLGEPPAAPSGVGPNTMAAGGGAPMADNNEGADGVGSSSGNWHCDSTWLGDRVITTS |
| | TRTWALPTYNNHLYKQISNSTSGGSSNDNTYFGYSTPWGYFDFNRFHCHFSPRDWQRLINN |
| | NWGFRPKRLSFKLFNIQVKEVTDNNGVKTIANNLTSTIQVFTDSEYQLPYVLGSAHQGCLP |
| | PFPADVFMIPQYGYLTLNDGSQAVGRSSFYCLEYFPSQMLRTGNNFQFTYTFEDVPFHSSY |
| | AHSQSLDRLMNPLIDQYLYYLSRTINGSGQNQQTLGFSVAGPSNMAVQGRNWLPGPCYRQQ |
| | RVSTTVTQNNNSEFAWPGGTKYHLNGRNSLANPGIAMATHKEGEDRFFPLSGILIFGKQGT |
| | GRDNVDADKVMLTSEEEIKTTNPVATEEYGIVATNHQSAQAQAQTGTVNSQGALPGMVWQN |
| | RDVYLQGPIWAKIPHTDGNFHPSPLMGGFGLKHPPPQILIKNTPVPADPPTTFNQSKLNSF |
| | ITQYSTGQVSVEIEWELQKENSKRWNPEIQYTSNYYKSNNVEFAVNTEGVYSEPRPIGTRY |
| | LTRNL |
| 122 | MAADGYLPDWLEDNLSEGIREWWALKPGAPKPKANQQKQDDGRGLVLPGYKYLGPFNGLDK |
| | GEPVNAADAAALEHDKAYDQQLQAGDNPYLRYNHADAEFQERLQEDTSFGGNLGRAVFQAK |
| | KRVLEPLGLVEEGAKTAPGKKRPVEPSPQRSPDSSTGIGKKGQQPARKRLNFGQTGDSESV |
| | PDPQPLGEPPAAPSGVGPNTMAAGGGAPMADNNEGADGVGSSSGNWHCDSTWLGDRVITTS |
| | TRTWALPTYNNHLYKQISNSTSGGSSNDNTYFGYSTPWGYFDFNRFHCHFSPRDWQRLINN |
| | NWGFRPKRLSFKLFNIQVKEVTDNNGVKTIANNLTSTIQVFTDSEYQLPYVLGSAHQGCLP |
| | PFPADVFMIPQYGYLTLNDGSQAVGRSSFYCLEYFPSQMLRTGNNFQFTYTFEDVPFHSSY |
| | AHSQSLDRLMNPLIDQYLYYLSKTINGSGQNQQTLKFSVAGPSNMAVQGRNYIPGPSYRQQ |
| | RVSTTVTQNNNSEFAWPGASSWALNGRNSLMNPGPAMASHKEGEDRFFPLSGSLIFGKQGT |
| | GRDNVDADKVMITNEEEIKTTNPVATESYGQVATNHQSAQAQAQTGWVQNQGILPGMVWQN |
| | RDVYLQGPIWAKIPHTDGNFHPSPLMGGFGLKHPPPQILIKNTPVPADPPTTFNQSKLNSF |
| | ITQYSTGQVSVEIEWELQKENSKRWNPEIQYTSNYYKSNNVEFAVNTEGVYSEPRPIGTRY |
| | LTRNL |
| 123 | MAADGYLPDWLEDNLSEGIREWWDLKPGAPKPKANQQKQDDGRGLVLPGYKYLGPFNGLDK |
| | GEPVNAADAAALEHDKAYDQQLKAGDNPYLRYNHADAEFQERLQEDTSFGGNLGRAVFQAK |
| | KRVLEPLGLVEEGAKTAPGKKRPVEQSPQEPDSSSGIGKTGQQPAKKRLNFGQTGDSESVP |
| | DPQPLGEPPAAPSGVGSNTMASGGGAPMADNNEGADGVGNSSGNWHCDSTWLGDRVITTST |
| | RTWALPTYNNHLYKQISNSTSGGSSNDNTYFGYSTPWGYFDFNRFHCHFSPRDWQRLINNN |
| | WGFRPKRLNFKLFNIQVKEVTDNNGVKTIANNLTSTVQVFTDSEYQLPYVLGSAHQGCLPP |
| | FPADVFMIPQYGYLTLNDGSQAVGRSSFYCLEYFPSQMLRTGNNFQFSYTFEDVPFHSSYA |
| | HSQSLDRLMNPLIDQYLYFLSRTINGSGQNQQTLQFSQAGPSSMANQARNWVPGPCYRQQR |
| | VSTTVTQNNNSEFAWPGATKYHLNGRDSLMNPGVAMASHKEGEDRFFPLSGVLIFGKQGTG |
| | RDNVDADKVMITNEEEIKTTNPVATEEYGAVATNHQSAQTLAVPFKAQAQTGLVHNQGVLP |
| | GMVWQNRDVYLQGPIWAKIPHTDGNFHPSPLMGGFGLKHPPPQILIKNTPVPADPPTTFNQ |
| | AKLNSFITQYSTGQVSVEIEWELQKENSKRWNPEIQYTSNYYKSNNVEFAVNTEGVYSEPR |
| | PIGTRFLTRNL |
| 124 | MAADGYLPDWLEDNLSEGIREWWDLKPGAPKPKANQQKQDDGRGLVLPGYKYLGPFNGLDK |
| | GEPVNAADAAALEHDKAYDQQLKAGDNPYLRYNHADAEFQERLQEDTSFGGNLGRAVFQAK |
| | KRVLEPLGLVEEGAKTAPGKKRPVEQSPQEPDSSSGIGKTGQQPAKKRLNFGQTGDSESVP |
| | DPQPLGEPPAAPSGVGSNTMASGGGAPMADNNEGADGVGNSSGNWHCDSTWLGDRVITTST |
| | RTWALPTYNNHLYKQISNSTSGGSSNDNTYFGYSTPWGYFDFNRFHCHFSPRDWQRLINNN |
| | WGFRPKRLNFKLFNIQVKEVTDNNGVKTIANNLTSTVQVFTDSEYQLPYVLGSAHQGCLPP |
| | FPADVFMIPQYGYLTLNDGSQAVGRSSFYCLEYFPSQMLRTGNNFQFSYTFEDVPFHSSYA |
| | HSQSLDRLMNPLIDQYLYFLSRTINGSGQNQQTLQFSQAGPSSMANQARNWVPGPCYRQQR |
| | VSTTVTQNNNSEFAWPGATKYHLNGRDSLMNPGVAMASHKEGEDRFFPLSGVLIFGKQGTG |
| | RDNVDADKVMITNEEEIKTTNPVATEEYGAVATNHQSAQAQAQTGLVHNQGVLPGMVWQNR |
| | DVYLQGPIWAKIPHTDGNFHPSPLMGGFGLKHPPPQILIKNTPVPADPPTTFNQAKLNSFI |
| | TQYSTGQVSVEIEWELQKENSKRWNPEIQYTSNYYKSNNVEFAVNTEGVYSEPRPIGTRFL |
| | TRNL |
| 125 | MAADGYLPDWLEDNLSEGIREWWDLKPGAPKPKANQQKQDDGRGLVLPGYKYLGPFNGLDK |
| | GEPVNAADAAALEHDKAYDQQLKAGDNPYLRYNHADAEFQERLQEDTSFGGNLGRAVFQAK |
| | KRVLEPLGLVEEGAKTAPGKKRPVEQSPQEPDSSSGIGKTGQQPAKKRLNFGQTGDSESVP |
| | DPQPLGEPPAAPSGVGSNTMASGGGAPMADNNEGADGVGNSSGNWHCDSTWLGDRVITTST |
| | RTWALPTYNNHLYKQISNGTSGGSTNDNTYFGYSTPWGYFDFNRFHCHFSPRDWQRLINNN |
| | WGFRPKRLNFKLFNIQVKEVTTNEGTKTIANNLTSTVQVFTDSEYQLPYVLGSAHQGCLPP |
| | FPADVFMIPQYGYLTLNNGSQAVGRSSFYCLEYFPSQMLRTGNNFQFSYTFEDVPFHSSYA |
| | HSQSLDRLMNPLIDQYLYFLSRTINGSGQNQQTLKFSVAGPSNMAVQGRNYIPGPSYRQQR |
| | VSTTVTQNNNSEFAWPGASSWALNGRNSLMNPGPAMASHKEGEDRFFPLSGSLIFGKQGTG |
| | RDNVDADKVMITNEEEIKTTNPVATESYGQVATNHQSAQTLAVPFKAQAQTGWVQNQGVLP |
| | GMVWQNRDVYLQGPIWAKIPHTDGNFHPSPLMGGFGLKHPPPQILIKNTPVPADPPTTFNQ |
| | AKLNSFITQYSTGQVSVEIEWELQKENSKRWNPEIQYTSNYYKSTNVDFAVNTEGVYSEPR |
| | PIGTRFLTRNL |
| 126 | MAADGYLPDWLEDNLSEGIREWWDLKPGAPKPKANQQKQDDGRGLVLPGYKYLGPFNGLDK |
| | GEPVNAADAAALEHDKAYDQQLKAGDNPYLRYNHADAEFQERLQEDTSFGGNLGRAVFQAK |
| | KRVLEPLGLVEEGAKTAPGKKRPVEQSPQEPDSSSGIGKTGQQPAKKRLNFGQTGDSESVP |
| | DPQPLGEPPAAPSGVGSNTMASGGGAPMADNNEGADGVGNSSGNWHCDSTWLGDRVITTST |
| | RTWALPTYNNHLYKQISNGTSGGSTNDNTYFGYSTPWGYFDFNRFHCHFSPRDWQRLINNN |
| | WGFRPKRLNFKLFNIQVKEVTTNEGTKTIANNLTSTVQVFTDSEYQLPYVLGSAHQGCLPP |
| | FPADVFMIPQYGYLTLNNGSQAVGRSSFYCLEYFPSQMLRTGNNFQFSYTFEDVPFHSSYA |
| | HSQSLDRLMNPLIDQYLYFLSRTINGSGQNQQTLKFSVAGPSNMAVQGRNYIPGPSYRQQR |
| | VSTTVTQNNNSEFAWPGASSWALNGRNSLMNPGPAMASHKEGEDRFFPLSGSLIFGKQGTG |
| | RDNVDADKVMITNEEEIKTTNPVATESYGQVATNHQSAQAQAQTGWVQNQGVLPGMVWQNR |
| | DVYLQGPIWAKIPHTDGNFHPSPLMGGFGLKHPPPQILIKNTPVPADPPTTFNQAKLNSFI |
| | TQYSTGQVSVEIEWELQKENSKRWNPEIQYTSNYYKSTNVDFAVNTEGVYSEPRPIGTRFL |
| | TRNL |
| 127 | MAADGYLPDWLEDNLSEGIREWWDLKPGAPKPKANQQKQDDGRGLVLPGYKYLGPFNGLDK |
| | GEPVNAADAAALEHDKAYDQQLKAGDNPYLRYNHADAEFQERLQEDTSFGGNLGRAVFQAK |
| | KRVLEPLGLVEEGAKTAPGKKRPVEQSPQEPDSSSGIGKTGQQPAKKRLNFGQTGDSESVP |
| | DPQPLGEPPAAPSGVGSNTMASGGGAPMADNNEGADGVGNSSGNWHCDSTWLGDRVITTST |
| | RTWALPTYNNHLYKQISNSTSGGSSNDNTYFGYSTPWGYFDFNRFHCHFSPRDWQRLINNN |
| | WGFRPKRLNFKLFNIQVKEVTDNNGVKTIANNLTSTVQVFTDSEYQLPYVLGSAHQGCLPP |
| | FPADVFMIPQYGYLTLNDGSQAVGRSSFYCLEYFPSQMLRTGNNFQFSYTFEDVPFHSSYA |
| | HSQSLDRLMNPLIDQYLYFLSRTINGSGQNQQTLQFSVAGPSNMAVQARNWVPGPCYRQQR |
| | VSTTVTQNNNSEFAWPGATKYHLNGRDSLMNPGVAMASHKEGEDRFFPLSGVLIFGKQGTG |
| | RDNVDADKVMITNEEEIKTTNPVATEEYGAVATNHQSAQAQAQTGLVHNQGVLPGMVWQNR |
| | DVYLQGPIWAKIPHTDGNFHPSPLMGGFGLKHPPPQILIKNTPVPADPPTTFNQAKLNSFI |
| | TQYSTGQVSVEIEWELQKENSKRWNPEIQYTSNYYKSNNVEFAVNTEGVYSEPRPIGTRFL |
| | TRNL |
| 128 | MAADGYLPDWLEDNLSEGIREWWDLKPGAPKPKANQQKQDDGRGLVLPGYKYLGPFNGLDK |
| | GEPVNAADAAALEHDKAYDQQLKAGDNPYLRYNHADAEFQERLQEDTSFGGNLGRAVFQAK |
| | KRVLEPLGLVEEGAKTAPGKKRPVEQSPQEPDSSSGIGKTGQQPAKKRLNFGQTGDSESVP |
| | DPQPLGEPPAAPSGVGSNTMASGGGAPMADNNEGADGVGNSSGNWHCDSTWLGDRVITTST |
| | RTWALPTYNNHLYKQISNGTSGGSTNDNTYFGYSTPWGYFDFNRFHCHFSPRDWQRLINNN |
| | WGFRPKRLNFKLFNIQVKEVTTNEGTKTIANNLTSTVQVFTDSEYQLPYVLGSAHQGCLPP |
| | FPADVFMIPQYGYLTLNNGSQAVGRSSFYCLEYFPSQMLRTGNNFQFSYTFEDVPFHSSYA |
| | HSQSLDRLMNPLIDQYLYFLSRTQTTGGTANTQTLGFSQGGPNTMANQAKNWLPGPCYRQQ |
| | RVSTTTGQNNNSNFAWTAGTKYHLNGRNSLANPGIAMATHKDDEERFFPSNGILIFGKQNA |
| | ARDNADYSDVMLTSEEEIKTTNPVATEEYGIVADNLQQQNTAPQIGTVNSQGVLPGMVWQN |
| | RDVYLQGPIWAKIPHTDGNFHPSPLMGGFGLKHPPPQILIKNTPVPADPPTTFNQAKLNSF |
| | ITQYSTGQVSVEIEWELQKENSKRWNPEIQYTSNYYKSTNVDFAVNTEGVYSEPRPIGTRF |
| | LTRNL |
| 129 | MAADGYLPDWLEDNLSEGIREWWALKPGAPQPKANQQHQDNARGLVLPGYKYLGPGNGLDK |
| | GEPVNAADAAALEHDKAYDQQLKAGDNPYLKYNHADAEFQERLKEDTSFGGNLGRAVFQAK |
| | KRLLEPLGLVEEAAKTAPGKKRPVEQSPQEPDSSAGIGKSGAQPAKKRLNFGQTGDTESVP |
| | DPQPIGEPPAAPSGVGSLTMASGGGAPVADNNEGADGVGSSSGNWHCDSQWLGDRVITTST |
| | RTWALPTYNNHLYKQISNGTSGGSTNDNAYFGYSTPWGYFDFNRFHCHFSPRDWQRLINNN |
| | WGFRPKRLNFKLFNIQVKEVTTNEGTKTIANNLTSTVQVFTDSDYQLPYVLGSAHEGCLPP |
| | FPADVFMIPQYGYLTLNNGSQAVGRSSFYCLEYFPSQMLRTGNNFQFSYEFENVPFHSSYA |
| | HSQSLDRLMNPLIDQYLYFLSRTQTTGTAGTQTLKFSVAGPSNMAVQGRNYIPGPSYRQQR |
| | VSTTTNQNNNSNFAWTGASSWALNGRNSLMNPGPAMASHKDDEDRFFPSSGSLIFGKQGAG |
| | NDNVDYSQVMITNEEEIKTTNPVATESYGQVATNNQSANTQAQTGWVQNQGILPGMVWQDR |
| | DVYLQGPIWAKIPHTDGNFHPSPLMGGFGMKHPPPQILIKNTPVPADPPTAFNKDKLNSFI |
| | TQYSTGQVSVEIEWELQKENSKRWNPEIQYTSNYYKSTNVDFAVNTEGVYSEPRPIGTRFL |
| | TRNL |
| 130 | MAADGYLPDWLEDNLSEGIREWWALKPGAPQPKANQQHQDNARGLVLPGYKYLGPGNGLDK |
| | GEPVNAADAAALEHDKAYDQQLKAGDNPYLKYNHADAEFQERLKEDTSFGGNLGRAVFQAK |
| | KRLLEPLGLVEEAAKTAPGKKRPVEQSPQEPDSSAGIGKSGAQPAKKRLNFGQTGDTESVP |
| | DPQPIGEPPAAPSGVGSLTMASGGGAPVADNNEGADGVGSSSGNWHCDSQWLGDRVITTST |
| | RTWALPTYNNHLYKQISNSTSGGSSNDNAYFGYSTPWGYFDFNRFHCHFSPRDWQRLINNN |
| | WGFRPKRLNFKLFNIQVKEVTDNNGVKTIANNLTSTVQVFTDSDYQLPYVLGSAHEGCLPP |
| | FPADVFMIPQYGYLTLNDGSQAVGRSSFYCLEYFPSQMLRTGNNFQFSYEFENVPFHSSYA |
| | HSQSLDRLMNPLIDQYLYFLSRTQTTGTAGTQTLQFSQAGPSSMANQARNWVPGPCYRQQR |
| | VSTTTNQNNNSNFAWTGATKYHLNGRDSLMNPGVAMASHKDDEDRFFPSSGVLIFGKQGAG |
| | NDNVDYSQVMITNEEEIKTTNPVATEEYGAVATNNQSANTQAQTGLVHNQGILPGMVWQDR |
| | DVYLQGPIWAKIPHTDGNFHPSPLMGGFGMKHPPPQILIKNTPVPADPPTAFNKDKLNSFI |
| | TQYSTGQVSVEIEWELQKENSKRWNPEIQYTSNYYKSNNVEFAVNTEGVYSEPRPIGTRFL |
| | TRNL |
| 131 | MAADGYLPDWLEDNLSEGIREWWALKPGAPKPKANQQKQDDGRGLVLPGYKYLGPFNGLDK |
| | GEPVNAADAAALEHDKAYDQQLQAGDNPYLRYNHADAEFQERLQEDTSFGGNLGRAVFQAK |
| | KRVLEPLGLVEEGAKTAPGKKRPVEPSPQRSPDSSTGIGKKGQQPARKRLNFGQTGDSESV |
| | PDPQPLGEPPAAPSGVGPNTMAAGGGAPMADNNEGADGVGSSSGNWHCDSTWLGDRVITTS |
| | TRTWALPTYNNHLYKQISNGTSGGSTNDNTYFGYSTPWGYFDFNRFHCHFSPRDWQRLINN |
| | NWGFRPKRLSFKLFNIQVKEVTTNEGTKTIANNLTSTIQVFTDSEYQLPYVLGSAHQGCLP |
| | PFPADVFMIPQYGYLTLNNGSQAVGRSSFYCLEYFPSQMLRTGNNFQFTYTFEDVPFHSSY |
| | AHSQSLDRLMNPLIDQYLYFLSRTQTTGTAGTQTLGFSQGGPNTMANQAKNWLPGPCYRQQ |
| | RVSTTTNQNNNSNFAWTGGTKYHLNGRNSLANPGIAMATHKDDEDRFFPSSGILIFGKQGA |
| | GNDNVDYSQVMLTSEEEIKTTNPVATEEYGIVATNNQSANTQAQTGTVNSQGALPGMVWQN |
| | RDVYLQGPIWAKIPHTDGNFHPSPLMGGFGLKHPPPQILIKNTPVPADPPTTFNQSKLNSF |
| | ITQYSTGQVSVEIEWELQKENSKRWNPEIQYTSNYYKSTNVDFAVNTEGVYSEPRPIGTRF |
| | LTRNL |
| 132 | MAADGYLPDWLEDNLSEGIREWWALKPGAPKPKANQQKQDDGRGLVLPGYKYLGPFNGLDK |
| | GEPVNAADAAALEHDKAYDQQLQAGDNPYLRYNHADAEFQERLQEDTSFGGNLGRAVFQAK |
| | KRVLEPLGLVEEGAKTAPGKKRPVEPSPQRSPDSSTGIGKKGQQPARKRLNFGQTGDSESV |
| | PDPQPLGEPPAAPSGVGPNTMAAGGGAPMADNNEGADGVGSSSGNWHCDSTWLGDRVITTS |
| | TRTWALPTYNNHLYKQISNGTSGGATNDNTYFGYSTPWGYFDFNRFHCHFSPRDWQRLINN |
| | NWGFRPKRLSFKLFNIQVKEVTQNEGTKTIANNLTSTIQVFTDSEYQLPYVLGSAHQGCLP |
| | PFPADVFMIPQYGYLTLNNGSQAVGRSSFYCLEYFPSQMLRTGNNFQFTYTFEDVPFHSSY |
| | AHSQSLDRLMNPLIDQYLYFLSRTQTTGTAGTQTLQFSQAGPSSMANQARNWVPGPCYRQQ |
| | RVSTTTNQNNNSNFAWTGATKYHLNGRDSLMNPGVAMASHKDDEDRFFPSSGVLIFGKQGA |
| | GNDNVDYSQVMITNEEEIKTTNPVATEEYGAVATNNQSANTQAQTGLVHNQGALPGMVWQN |
| | RDVYLQGPIWAKIPHTDGNFHPSPLMGGFGLKHPPPQILIKNTPVPADPPTTFNQSKLNSF |
| | ITQYSTGQVSVEIEWELQKENSKRWNPEIQYTSNYYKSTSVDFAVNTEGVYSEPRPIGTRF |
| | LTRNL |
| 133 | MAADGYLPDWLEDNLSEGIREWWDLKPGAPKPKANQQKQDDGRGLVLPGYKYLGPFNGLDK |
| | GEPVNAADAAALEHDKAYDQQLKAGDNPYLRYNHADAEFQERLQEDTSFGGNLGRAVFQAK |
| | KRVLEPLGLVEEGAKTAPGKKRPVEQSPQEPDSSSGIGKTGQQPAKKRLNFGQTGDSESVP |
| | DPQPLGEPPAAPSGVGSNTMASGGGAPMADNNEGADGVGNSSGNWHCDSTWLGDRVITTST |
| | RTWALPTYNNHLYKQISNGTSGGATNDNTYFGYSTPWGYFDFNRFHCHFSPRDWQRLINNN |
| | WGFRPKRLNFKLFNIQVKEVTQNEGTKTIANNLTSTVQVFTDSEYQLPYVLGSAHQGCLPP |
| | FPADVFMIPQYGYLTLNNGSQAVGRSSFYCLEYFPSQMLRTGNNFQFSYTFEDVPFHSSYA |
| | HSQSLDRLMNPLIDQYLYFLSRTQTTGGTANTQTLQFSQAGPSSMANQARNWVPGPCYRQQ |
| | RVSTTTGQNNNSNFAWTAATKYHLNGRDSLMNPGVAMASHKDDEERFFPSNGVLIFGKQNA |
| | ARDNADYSDVMITNEEEIKTTNPVATEEYGAVADNLQQQNTAPQIGLVHNQGVLPGMVWQN |
| | RDVYLQGPIWAKIPHTDGNFHPSPLMGGFGLKHPPPQILIKNTPVPADPPTTFNQAKLNSF |
| | ITQYSTGQVSVEIEWELQKENSKRWNPEIQYTSNYYKSTSVDFAVNTEGVYSEPRPIGTRF |
| | LTRNL |
| 134 | MAADGYLPDWLEDNLSEGIREWWALKPGAPKPKANQQKQDDGRGLVLPGYKYLGPFNGLDK |
| | GEPVNAADAAALEHDKAYDQQLQAGDNPYLRYNHADAEFQERLQEDTSFGGNLGRAVFQAK |
| | KRVLEPLGLVEEGAKTAPGKKRPVEPSPQRSPDSSTGIGKKGQQPARKRLNFGQTGDSESV |
| | PDPQPLGEPPAAPSGVGPNTMAAGGGAPMADNNEGADGVGSSSGNWHCDSTWLGDRVITTS |
| | TRTWALPTYNNHLYKQISSASTGASNDNTYFGYSTPWGYFDFNRFHCHFSPRDWQRLINNN |
| | WGFRPKRLSFKLFNIQVKEVTTNDGVTTIANNLTSTIQVFTDSEYQLPYVLGSAHQGCLPP |
| | FPADVFMIPQYGYLTLNNGSQAVGRSSFYCLEYFPSQMLRTGNNFQFTYTFEDVPFHSSYA |
| | HSQSLDRLMNPLIDQYLYYLSRTQNQSGSAQNKDLGFSQGGPNTMANQAKNWLPGPCYRQQ |
| | RVSKTKTDNNNSNFTWTGATKYHLNGRNSLANPGIAMASHKDDKDKFFPMSGILIFGKESA |
| | GASNTALDNVMLTSEEEIKTTNPVATEEYGIVAVNLQSSSTDPATGTVNSQGALPGMVWQN |
| | RDVYLQGPIWAKIPHTDGNFHPSPLMGGFGLKHPPPQILIKNTPVPADPPTTFNQSKLNSF |
| | ITQYSTGQVSVEIEWELQKENSKRWNPEIQYTSNYAKSANVDFAVNTEGVYSEPRPIGTRY |
| | LTRNL |
| 135 | MAADGYLPDWLEDNLSEGIREWWALKPGAPKPKANQQKQDDGRGLVLPGYKYLGPFNGLDK |
| | GEPVNAADAAALEHDKAYDQQLQAGDNPYLRYNHADAEFQERLQEDTSFGGNLGRAVFQAK |
| | KRVLEPLGLVEEGAKTAPGKKRPVEPSPQRSPDSSTGIGKKGQQPARKRLNFGQTGDSESV |
| | PDPQPLGEPPAAPSGVGPNTMAAGGGAPMADNNEGADGVGSSSGNWHCDSTWLGDRVITTS |
| | TRTWALPTYNNHLYKQISSASTGASNDNTYFGYSTPWGYFDFNRFHCHFSPRDWQRLINNN |
| | WGFRPKRLSFKLFNIQVKEVTTNDGVTTIANNLTSTIQVFTDSEYQLPYVLGSAHQGCLPP |
| | FPADVFMIPQYGYLTLNNGSQAVGRSSFYCLEYFPSQMLRTGNNFQFTYTFEDVPFHSSYA |
| | HSQSLDRLMNPLIDQYLYYLSRTQNQSGSAQNKDLGFSRGSPAGMSVQAKNWLPGPCYRQQ |
| | RVSKTKTDNNNSNFTWTGATKYHLNGRNSLANPGIAMASHKDDKDKFFPMSGILIFGKESA |
| | GASNTALDNVMLTSEEEIKTTNPVATEEYGIVAVNLQSSSTDPATGTVNSQGALPGMVWQN |
| | RDVYLQGPIWAKIPHTDGNFHPSPLMGGFGLKHPPPQILIKNTPVPADPPTTFNQSKLNSF |
| | ITQYSTGQVSVEIEWELQKENSKRWNPEIQYTSNYAKSANVDFAVNTEGVYSEPRPIGTRY |
| | LTRNL |
| 136 | MAADGYLPDWLEDNLSEGIREWWALKPGAPKPKANQQKQDDGRGLVLPGYKYLGPFNGLDK |
| | GEPVNAADAAALEHDKAYDQQLQAGDNPYLRYNHADAEFQERLQEDTSFGGNLGRAVFQAK |
| | KRVLEPLGLVEEGAKTAPGKKRPVEPSPQRSPDSSTGIGKKGQQPARKRLNFGQTGDSESV |
| | PDPQPLGEPPAAPSGVGPNTMAAGGGAPMADNNEGADGVGSSSGNWHCDSTWLGDRVITTS |
| | TRTWALPTYNNHLYKQISSASTGASNDNTYFGYSTPWGYFDFNRFHCHFSPRDWQRLINNN |
| | WGFRPKRLSFKLFNIQVKEVTTNDGVTTIANNLTSTIQVFTDSEYQLPYVLGSAHQGCLPP |
| | FPADVFMIPQYGYLTLNNGSQAVGRSSFYCLEYFPSQMLRTGNNFQFTYTFEDVPFHSSYA |
| | HSQSLDRLMNPLIDQYLYYLNRTQNQSGSAQNKDLLFSRGSPAGMSVQPKNWLPGPCYRQQ |
| | RVSKTKTDNNNSNFTWTGASKYNLNGRESIINPGTAMASHKDDKDKFFPMSGVMIFGKESA |
| | GASNTALDNVMITDEEEIKATNPVATERFGTVAVNLQSSSTDPATGDVHVMGALPGMVWQN |
| | RDVYLQGPIWAKIPHTDGNFHPSPLMGGFGLKHPPPQILIKNTPVPADPPTTFNQSKLNSF |
| | ITQYSTGQVSVEIEWELQKENSKRWNPEIQYTSNYAKSANVDFAVNTEGVYSEPRPIGTRY |
| | LTRNL |
| 137 | MAADGYLPDWLEDNLSEGIREWWALKPGAPKPKANQQKQDDGRGLVLPGYKYLGPFNGLDK |
| | GEPVNAADAAALEHDKAYDQQLQAGDNPYLRYNHADAEFQERLQEDTSFGGNLGRAVFQAK |
| | KRVLEPLGLVEEGAKTAPGKKRPVEPSPQRSPDSSTGIGKKGQQPARKRLNFGQTGDSESV |
| | PDPQPLGEPPAAPSGVGPNTMAAGGGAPMADNNEGADGVGSSSGNWHCDSTWLGDRVITTS |
| | TRTWALPTYNNHLYKQISNSTSGGSSNDNTYFGYSTPWGYFDFNRFHCHFSPRDWQRLINN |
| | NWGFRPKRLSFKLFNIQVKEVTDNNGVKTIANNLTSTIQVFTDSEYQLPYVLGSAHQGCLP |
| | PFPADVFMIPQYGYLTLNDGSQAVGRSSFYCLEYFPSQMLRTGNNFQFTYTFEDVPFHSSY |
| | AHSQSLDRLMNPLIDQYLYYLSRTINGSGQNQQTLGFSVAGPANMAVQGRNWLPGPCYRQQ |
| | RVSTTVTQNNNSEFAWPGGTKYHLNGRNSLANPGIAMATHKEGEDRFFPLSGILIFGKQGT |
| | GRDNVDADKVMLTSEEEIKTTNPVATEEYGIVATNHQSAQAQAQTGTVNSQGALPGMVWQN |
| | RDVYLQGPIWAKIPHTDGNFHPSPLMGGFGLKHPPPQILIKNTPVPADPPTTFNQSKLNSF |
| | ITQYSTGQVSVEIEWELQKENSKRWNPEIQYTSNYYKSNNVEFAVNTEGVYSEPRPIGTRY |
| | LTRNL |
| 138 | MAADGYLPDWLEDNLSEGIREWWALKPGAPKPKANQQKQDDGRGLVLPGYKYLGPFNGLDK |
| | GEPVNAADAAALEHDKAYDQQLQAGDNPYLRYNHADAEFQERLQEDTSFGGNLGRAVFQAK |
| | KRVLEPLGLVEEGAKTAPGKKRPVEPSPQRSPDSSTGIGKKGQQPARKRLNFGQTGDSESV |
| | PDPQPLGEPPAAPSGVGPNTMAAGGGAPMADNNEGADGVGSSSGNWHCDSTWLGDRVITTS |
| | TRTWALPTYNNHLYKQISNSTSGGSSNDNTYFGYSTPWGYFDFNRFHCHFSPRDWQRLINN |
| | NWGFRPKRLSFKLFNIQVKEVTDNNGVKTIANNLTSTIQVFTDSEYQLPYVLGSAHQGCLP |
| | PFPADVFMIPQYGYLTLNDGSQAVGRSSFYCLEYFPSQMLRTGNNFQFTYTFEDVPFHSSY |
| | AHSQSLDRLMNPLIDQYLYYLSRTINGSGQNQQTLGFSVAGPTNMAVQGRNWLPGPCYRQQ |
| | RVSTTVTQNNNSEFAWPGGTKYHLNGRNSLANPGIAMATHKEGEDRFFPLSGILIFGKQGT |
| | GRDNVDADKVMLTSEEEIKTTNPVATEEYGIVATNHQSAQAQAQTGTVNSQGALPGMVWQN |
| | RDVYLQGPIWAKIPHTDGNFHPSPLMGGFGLKHPPPQILIKNTPVPADPPTTFNQSKLNSF |
| | ITQYSTGQVSVEIEWELQKENSKRWNPEIQYTSNYYKSNNVEFAVNTEGVYSEPRPIGTRY |
| | LTRNL |
| 139 | MAADGYLPDWLEDNLSEGIREWWALKPGAPKPKANQQKQDDGRGLVLPGYKYLGPFNGLDK |
| | GEPVNAADAAALEHDKAYDQQLQAGDNPYLRYNHADAEFQERLQEDTSFGGNLGRAVFQAK |
| | KRVLEPLGLVEEGAKTAPGKKRPVEPSPQRSPDSSTGIGKKGQQPARKRLNFGQTGDSESV |
| | PDPQPLGEPPAAPSGVGPNTMAAGGGAPMADNNEGADGVGSSSGNWHCDSTWLGDRVITTS |
| | TRTWALPTYNNHLYKQISNSTSGGSSNDNTYFGYSTPWGYFDFNRFHCHFSPRDWQRLINN |
| | NWGFRPKRLSFKLFNIQVKEVTDNNGVKTIANNLTSTIQVFTDSEYQLPYVLGSAHQGCLP |
| | PFPADVFMIPQYGYLTLNDGSQAVGRSSFYCLEYFPSQMLRTGNNFQFTYTFEDVPFHSSY |
| | AHSQSLDRLMNPLIDQYLYYLSRTINGSGQNQQTLGFSVAGPSNAAVQGRNWLPGPCYRQQ |
| | RVSTTVTQNNNSEFAWPGGTKYHLNGRNSLANPGIAMATHKEGEDRFFPLSGILIFGKQGT |
| | GRDNVDADKVMLTSEEEIKTTNPVATEEYGIVATNHQSAQAQAQTGTVNSQGALPGMVWQN |
| | RDVYLQGPIWAKIPHTDGNFHPSPLMGGFGLKHPPPQILIKNTPVPADPPTTFNQSKLNSF |
| | ITQYSTGQVSVEIEWELQKENSKRWNPEIQYTSNYYKSNNVEFAVNTEGVYSEPRPIGTRY |
| | LTRNL |
| 140 | MAADGYLPDWLEDNLSEGIREWWALKPGAPKPKANQQKQDDGRGLVLPGYKYLGPFNGLDK |
| | GEPVNAADAAALEHDKAYDQQLQAGDNPYLRYNHADAEFQERLQEDTSFGGNLGRAVFQAK |
| | KRVLEPLGLVEEGAKTAPGKKRPVEPSPQRSPDSSTGIGKKGQQPARKRLNFGQTGDSESV |
| | PDPQPLGEPPAAPSGVGPNTMAAGGGAPMADNNEGADGVGSSSGNWHCDSTWLGDRVITTS |
| | TRTWALPTYNNHLYKQISNSTSGGSSNDNTYFGYSTPWGYFDFNRFHCHFSPRDWQRLINN |
| | NWGFRPKRLSFKLFNIQVKEVTDNNGVKTIANNLTSTIQVFTDSEYQLPYVLGSAHQGCLP |
| | PFPADVFMIPQYGYLTLNDGSQAVGRSSFYCLEYFPSQMLRTGNNFQFTYTFEDVPFHSSY |
| | AHSQSLDRLMNPLIDQYLYYLSRTINGSGQNQQTLGFSVAGPSNIAVQGRNWLPGPCYRQQ |
| | RVSTTVTQNNNSEFAWPGGTKYHLNGRNSLANPGIAMATHKEGEDRFFPLSGILIFGKQGT |
| | GRDNVDADKVMLTSEEEIKTTNPVATEEYGIVATNHQSAQAQAQTGTVNSQGALPGMVWQN |
| | RDVYLQGPIWAKIPHTDGNFHPSPLMGGFGLKHPPPQILIKNTPVPADPPTTFNQSKLNSF |
| | ITQYSTGQVSVEIEWELQKENSKRWNPEIQYTSNYYKSNNVEFAVNTEGVYSEPRPIGTRY |
| | LTRNL |
| 141 | MAADGYLPDWLEDNLSEGIREWWALKPGAPKPKANQQKQDDGRGLVLPGYKYLGPFNGLDK |
| | GEPVNAADAAALEHDKAYDQQLQAGDNPYLRYNHADAEFQERLQEDTSFGGNLGRAVFQAK |
| | KRVLEPLGLVEEGAKTAPGKKRPVEPSPQRSPDSSTGIGKKGQQPARKRLNFGQTGDSESV |
| | PDPQPLGEPPAAPSGVGPNTMAAGGGAPMADNNEGADGVGSSSGNWHCDSTWLGDRVITTS |
| | TRTWALPTYNNHLYKQISNSTSGGSSNDNTYFGYSTPWGYFDFNRFHCHFSPRDWQRLINN |
| | NWGFRPKRLSFKLFNIQVKEVTDNNGVKTIANNLTSTIQVFTDSEYQLPYVLGSAHQGCLP |
| | PFPADVFMIPQYGYLTLNDGSQAVGRSSFYCLEYFPSQMLRTGNNFQFTYTFEDVPFHSSY |
| | AHSQSLDRLMNPLIDQYLYYLSRTINGSGQNQQTLGFSVAGPSNKAVQGRNWLPGPCYRQQ |
| | RVSTTVTQNNNSEFAWPGGTKYHLNGRNSLANPGIAMATHKEGEDRFFPLSGILIFGKQGT |
| | GRDNVDADKVMLTSEEEIKTTNPVATEEYGIVATNHQSAQAQAQTGTVNSQGALPGMVWQN |
| | RDVYLQGPIWAKIPHTDGNFHPSPLMGGFGLKHPPPQILIKNTPVPADPPTTFNQSKLNSF |
| | ITQYSTGQVSVEIEWELQKENSKRWNPEIQYTSNYYKSNNVEFAVNTEGVYSEPRPIGTRY |
| | LTRNL |
| 142 | MAADGYLPDWLEDNLSEGIREWWALKPGAPKPKANQQKQDDGRGLVLPGYKYLGPFNGLDK |
| | GEPVNAADAAALEHDKAYDQQLQAGDNPYLRYNHADAEFQERLQEDTSFGGNLGRAVFQAK |
| | KRVLEPLGLVEEGAKTAPGKKRPVEPSPQRSPDSSTGIGKKGQQPARKRLNFGQTGDSESV |
| | PDPQPLGEPPAAPSGVGPNTMAAGGGAPMADNNEGADGVGSSSGNWHCDSTWLGDRVITTS |
| | TRTWALPTYNNHLYKQISNSTSGGSSNDNTYFGYSTPWGYFDFNRFHCHFSPRDWQRLINN |
| | NWGFRPKRLSFKLFNIQVKEVTDNNGVKTIANNLTSTIQVFTDSEYQLPYVLGSAHQGCLP |
| | PFPADVFMIPQYGYLTLNDGSQAVGRSSFYCLEYFPSQMLRTGNNFQFTYTFEDVPFHSSY |
| | AHSQSLDRLMNPLIDQYLYYLSRTINGSGQNQQTLGFSVAGASNMAVQGRNWLPGPCYRQQ |
| | RVSTTVTQNNNSEFAWPGGTKYHLNGRNSLANPGIAMATHKEGEDRFFPLSGILIFGKQGT |
| | GRDNVDADKVMLTSEEEIKTTNPVATEEYGIVATNHQSAQAQAQTGTVNSQGALPGMVWQN |
| | RDVYLQGPIWAKIPHTDGNFHPSPLMGGFGLKHPPPQILIKNTPVPADPPTTFNQSKLNSF |
| | ITQYSTGQVSVEIEWELQKENSKRWNPEIQYTSNYYKSNNVEFAVNTEGVYSEPRPIGTRY |
| | LTRNL |
| 143 | MAADGYLPDWLEDNLSEGIREWWDLKPGAPKPKANQQKQDDGRGLVLPGYKYLGPFNGLDK |
| | GEPVNAADAAALEHDKAYDQQLKAGDNPYLRYNHADAEFQERLQEDTSFGGNLGRAVFQAK |
| | KRVLEPLGLVEEGAKTAPGKKRPVEQSPQEPDSSSGIGKTGQQPAKKRLNFGQTGDSESVP |
| | DPQPLGEPPAAPSGVGSNTMASGGGAPMADNNEGADGVGNSSGNWHCDSTWLGDRVITTST |
| | RTWALPTYNNHLYKQISNSTSGGSSNDNTYFGYSTPWGYFDFNRFHCHFSPRDWQRLINNN |
| | WGFRPKRLNFKLFNIQVKEVTDNNGVKTIANNLTSTVQVFTDSEYQLPYVLGSAHQGCLPP |
| | FPADVFMIPQYGYLTLNDGSQAVGRSSFYCLEYFPSQMLRTGNNFQFSYTFEDVPFHSSYA |
| | HSQSLDRLMNPLIDQYLYFLSRTINGSGQNQQTLQFSQAGPSSMANQARNWVPGPCYRQQR |
| | VSTTVTQNNNSEFAWPGATKYHLNGRDSLMNPGVAMASHKEGEDRFFPLSGVLIFGKQGTG |
| | RDNVDADKVMITNEEEIKTTNPVATEEYGAVATNHQRGNRQAQTGLVHNQGVLPGMVWQNR |
| | DVYLQGPIWAKIPHTDGNFHPSPLMGGFGLKHPPPQILIKNTPVPADPPTTFNQAKLNSFI |
| | TQYSTGQVSVEIEWELQKENSKRWNPEIQYTSNYYKSNNVEFAVNTEGVYSEPRPIGTRFL |
| | TRNL |
| 144 | MAADGYLPDWLEDNLSEGIREWWALKPGAPKPKANQQKQDDGRGLVLPGYKYLGPFNGLDK |
| | GEPVNAADAAALEHDKAYDQQLQAGDNPYLRYNHADAEFQERLQEDTSFGGNLGRAVFQAK |
| | KRVLEPLGLVEEGAKTAPGKKRPVEPSPQRSPDSSTGIGKKGQQPARKRLNFGQTGDSESV |
| | PDPQPLGEPPAAPSGVGPNTMAAGGGAPMADNNEGADGVGSSSGNWHCDSTWLGDRVITTS |
| | TRTWALPTYNNHLYKQIKSGSVDGSNDNTYFGYSTPWGYFDFNRFHCHFSPRDWQRLINNN |
| | WGFRPKRLSFKLFNIQVKEVTVQDSTTTIANNLTSTIQVFTDSEYQLPYVLGSAHQGCLPP |
| | FPADVFMIPQYGYLTLNRDNTENPTERSSFYCLEYFPSQMLRTGNNFQFTYTFEDVPFHSS |
| | YAHSQSLDRLMNPLIDQYLYYLSRTNTGGVQFSQGGPNTMANQAKNWLPGPCYRQQGWNLG |
| | SGVNRASVSAFATGTKYHLNGRNSLANPGIAMATNNLQGSNTYALENTLIFNSQPANPGTT |
| | ATYLEGNMLTSEEEIKTTNPVATEEYGIVATNNQSSTTAPATGTVNSQGALPGMVWQNRDV |
| | YLQGPIWAKIPHTDGNFHPSPLMGGFGLKHPPPQILIKNTPVPADPPTTFNQSKLNSFITQ |
| | YSTGQVSVEIEWELQKENSKRWNPEIQYTSNYNDPQFVDFAVNTEGVYSEPRPIGTRYLTR |
| | NL |
| 145 | MAADGYLPDWLEDNLSEGIREWWDLKPGAPKPKANQQKQDDGRGLVLPGYKYLGPFNGLDK |
| | GEPVNAADAAALEHDKAYDQQLKAGDNPYLRYNHADAEFQERLQEDTSFGGNLGRAVFQAK |
| | KRVLEPLGLVEEGAKTAPGKKRPVEQSPQEPDSSSGIGKTGQQPAKKRLNFGQTGDSESVP |
| | DPQPLGEPPAAPSGVGSNTMASGGGAPMADNNEGADGVGNSSGNWHCDSTWLGDRVITTST |
| | RTWALPTYNNHLYKQIKSGSVDGSNDNTYFGYSTPWGYFDFNRFHCHFSPRDWQRLINNNW |
| | GFRPKRLNFKLFNIQVKEVTVQDSTTTIANNLTSTVQVFTDSEYQLPYVLGSAHQGCLPPF |
| | PADVFMIPQYGYLTLNRDNTENPTERSSFYCLEYFPSQMLRTGNNFQFSYTFEDVPFHSSY |
| | AHSQSLDRLMNPLIDQYLYFLSRTNTGGVQFSQAGPSSMANQARNWVPGPCYRQQGWNLGS |
| | GVNRASVSAFATATKYHLNGRDSLMNPGVAMASNNLQGSNTYALENTLIFNSQPANPGTTA |
| | TYLEGNMITNEEEIKTTNPVATEEYGAVATNNQSSTTAPATGLVHNQGVLPGMVWQNRDVY |
| | LQGPIWAKIPHTDGNFHPSPLMGGFGLKHPPPQILIKNTPVPADPPTTFNQAKLNSFITQY |
| | STGQVSVEIEWELQKENSKRWNPEIQYTSNYNDPQFVDFAVNTEGVYSEPRPIGTRFLTRN |
| | L |
| 146 | MAADGYLPDWLEDNLSEGIREWWALKPGAPKPKANQQKQDDGRGLVLPGYKYLGPFNGLDK |
| | GEPVNAADAAALEHDKAYDQQLQAGDNPYLRYNHADAEFQERLQEDTSFGGNLGRAVFQAK |
| | KRVLEPLGLVEEGAKTAPGKKRPVEPSPQRSPDSSTGIGKKGQQPARKRLNFGQTGDSESV |
| | PDPQPLGEPPAAPSGVGPNTMAAGGGAPMADNNEGADGVGSSSGNWHCDSTWLGDRVITTS |
| | TRTWALPTYNNHLYKQISSASTGASNDNTYFGYSTPWGYFDFNRFHCHFSPRDWQRLINNN |
| | WGFRPKRLSFKLFNIQVKEVTTNDGVTTIANNLTSTIQVFTDSEYQLPYVLGSAHQGCLPP |
| | FPADVFMIPQYGYLTLNNGSQAVGRSSFYCLEYFPSQMLRTGNNFQFTYTFEDVPFHSSYA |
| | HSQSLDRLMNPLIDQYLYYLSRTQNQSGSAQNKDLGFSQGGPNTMANQAKNWLPGPCYRQQ |
| | RVSKTKTDNNNSNFTWTGATKYHLNGRNSLANPGIAMASHKDDKDKFFPMSGILIFGKESA |
| | GASNTALDNVMLTSEEEIKTTNPVATEEYGIVAVNLQSSSTDPATGTVNSQGALPGMVWQN |
| | RDVYLQGPIWAKIPHTDGNFHPSPLMGGFGLKHPPPQILIKNTPVPADPPTTFNQSKLNSF |
| | ITQYSTGQVSVEIEWELQKENSKRWNPEIQYTSNYAKSANVDFAVNTEGVYSEPRPIGTRY |
| | LTRNL |
| 147 | MAADGYLPDWLEDNLSEGIREWWALKPGAPKPKANQQKQDDGRGLVLPGYKYLGPFNGLDK |
| | GEPVNAADAAALEHDKAYDQQLQAGDNPYLRYNHADAEFQERLQEDTSFGGNLGRAVFQAK |
| | KRVLEPLGLVEEGAKTAPGKKRPVEPSPQRSPDSSTGIGKKGQQPARKRLNFGQTGDSESV |
| | PDPQPLGEPPAAPSGVGPNTMAAGGGAPMADNNEGADGVGSSSGNWHCDSTWLGDRVITTS |
| | TRTWALPTYNNHLYKQISSASTGASNDNTYFGYSTPWGYFDFNRFHCHFSPRDWQRLINNN |
| | WGFRPKRLSFKLFNIQVKEVTTNDGVTTIANNLTSTIQVFTDSEYQLPYVLGSAHQGCLPP |
| | FPADVFMIPQYGYLTLNNGSQAVGRSSFYCLEYFPSQMLRTGNNFQFTYTFEDVPFHSSYA |
| | HSQSLDRLMNPLIDQYLYYLSRTQNQSGSAQNKDLGFSRGSPAGMSVQAKNWLPGPCYRQQ |
| | RVSKTKTDNNNSNFTWTGATKYHLNGRNSLANPGIAMASHKDDKDKFFPMSGILIFGKESA |
| | GASNTALDNVMLTSEEEIKTTNPVATEEYGIVAVNLQSSSTDPATGTVNSQGALPGMVWQN |
| | RDVYLQGPIWAKIPHTDGNFHPSPLMGGFGLKHPPPQILIKNTPVPADPPTTFNQSKLNSF |
| | ITQYSTGQVSVEIEWELQKENSKRWNPEIQYTSNYAKSANVDFAVNTEGVYSEPRPIGTRY |
| | LTRNL |
| 148 | MAADGYLPDWLEDNLSEGIREWWALKPGAPKPKANQQKQDDGRGLVLPGYKYLGPFNGLDK |
| | GEPVNAADAAALEHDKAYDQQLQAGDNPYLRYNHADAEFQERLQEDTSFGGNLGRAVFQAK |
| | KRVLEPLGLVEEGAKTAPGKKRPVEPSPQRSPDSSTGIGKKGQQPARKRLNFGQTGDSESV |
| | PDPQPLGEPPAAPSGVGPNTMAAGGGAPMADNNEGADGVGSSSGNWHCDSTWLGDRVITTS |
| | TRTWALPTYNNHLYKQISSASTGASNDNTYFGYSTPWGYFDFNRFHCHFSPRDWQRLINNN |
| | WGFRPKRLSFKLFNIQVKEVTTNDGVTTIANNLTSTIQVFTDSEYQLPYVLGSAHQGCLPP |
| | FPADVFMIPQYGYLTLNNGSQAVGRSSFYCLEYFPSQMLRTGNNFQFTYTFEDVPFHSSYA |
| | HSQSLDRLMNPLIDQYLYYLNRTQNQSGSAQNKDLLFSRGSPAGMSVQPKNWLPGPCYRQQ |
| | RVSKTKTDNNNSNFTWTGASKYNLNGRESIINPGTAMASHKDDKDKFFPMSGVMIFGKESA |
| | GASNTALDNVMITDEEEIKATNPVATERFGTVAVNLQSSSTDPATGDVHVMGALPGMVWQN |
| | RDVYLQGPIWAKIPHTDGNFHPSPLMGGFGLKHPPPQILIKNTPVPADPPTTFNQSKLNSF |
| | ITQYSTGQVSVEIEWELQKENSKRWNPEIQYTSNYAKSANVDFAVNTEGVYSEPRPIGTRY |
| | LTRNL |
| 149 | MAADGYLPDWLEDNLSEGIREWWALKPGAPKPKANQQKQDDGRGLVLPGYKYLGPFNGLDK |
| | GEPVNAADAAALEHDKAYDQQLQAGDNPYLRYNHADAEFQERLQEDTSFGGNLGRAVFQAK |
| | KRVLEPLGLVEEGAKTAPGKKRPVEPSPQRSPDSSTGIGKKGQQPARKRLNFGQTGDSESV |
| | PDPQPLGEPPAAPSGVGPNTMAAGGGAPMADNNEGADGVGSSSGNWHCDSTWLGDRVITTS |
| | TRTWALPTYNNHLYKQISSETAGSTNDNTYFGYSTPWGYFDFNRFHCHFSPRDWQRLINNN |
| | WGFRPKRLSFKLFNIQVKEVTTNDGVTTIANNLTSTIQVFTDSEYQLPYVLGSAHQGCLPP |
| | FPADVFMIPQYGYLTLNNGSQAVGRSSFYCLEYFPSQMLRTGNNFQFTYTFEDVPFHSSYA |
| | HSQSLDRLMNPLIDQYLYYLSRTQSNPGGTAGNRELGFSQGGPSTMAEQAKNWLPGPCYRQ |
| | QRVSKTLDQNNNSNFAWTGATKYHLNGRNSLANPGIAMATHKDDEDRFFPSSGILIFGKTG |
| | ATNKTTLENVMLTSEEEIKTTNPVATEEYGIVSSNLQAANTAAQTGTVNSQGALPGMVWQN |
| | RDVYLQGPIWAKIPHTDGNFHPSPLMGGFGLKHPPPQILIKNTPVPADPPTTFNQSKLNSF |
| | ITQYSTGQVSVEIEWELQKENSKRWNPEIQYTSNFEKQTGVDFAVNTEGVYSEPRPIGTRY |
| | LTRNL |
| 150 | MAADGYLPDWLEDNLSEGIREWWALKPGAPKPKANQQKQDDGRGLVLPGYKYLGPFNGLDK |
| | GEPVNAADAAALEHDKAYDQQLQAGDNPYLRYNHADAEFQERLQEDTSFGGNLGRAVFQAK |
| | KRVLEPLGLVEEGAKTAPGKKRPVEPSPQRSPDSSTGIGKKGQQPARKRLNFGQTGDSESV |
| | PDPQPLGEPPAAPSGVGPNTMAAGGGAPMADNNEGADGVGSSSGNWHCDSTWLGDRVITTS |
| | TRTWALPTYNNHLYKQISSETAGSTNDNTYFGYSTPWGYFDFNRFHCHFSPRDWQRLINNN |
| | WGFRPKRLSFKLFNIQVKEVTTNDGVTTIANNLTSTIQVFTDSEYQLPYVLGSAHQGCLPP |
| | FPADVFMIPQYGYLTLNNGSQAVGRSSFYCLEYFPSQMLRTGNNFQFTYTFEDVPFHSSYA |
| | HSQSLDRLMNPLIDQYLYYLARTQSNPGGTAGNRELQFYQGGPSTMAEQAKNWLPGPCFRQ |
| | QRVSKTLDQNNNSNFAWTGATKYHLNGRNSLVNPGVAMATHKDDEDRFFPSSGVLIFGKTG |
| | ATNKTTLENVLMTNEEEIRPTNPVATEEYGIVSSNLQAANTAAQTQVVNNQGALPGMVWQN |
| | RDVYLQGPIWAKIPHTDGNFHPSPLMGGFGLKHPPPQILIKNTPVPADPPTTFNQSKLNSF |
| | ITQYSTGQVSVEIEWELQKENSKRWNPEIQYTSNFEKQTGVDFAVNTEGVYSEPRPIGTRY |
| | LTRNL |
| 151 | MAADGYLPDWLEDNLSEGIREWWDLKPGAPKPKANQQKQDDGRGLVLPGYKYLGPFNGLDK |
| | GEPVNAADAAALEHDKAYDQQLKAGDNPYLRYNHADAEFQERLQEDTSFGGNLGRAVFQAK |
| | KRVLEPLGLVEEGAKTAPGKKRPVEQSPQEPDSSSGIGKTGQQPAKKRLNFGQTGDSESVP |
| | DPQPLGEPPAAPSGVGSNTMASGGGAPMADNNEGADGVGNSSGNWHCDSTWLGDRVITTST |
| | RTWALPTYNNHLYKQISNGTSGGATNDNTYFGYSTPWGYFDFNRFHCHFSPRDWQRLINNN |
| | WGFRPKRLNFKLFNIQVKEVTQNEGTKTIANNLTSTVQVFTDSEYQLPYVLGSAHQGCLPP |
| | FPADVFMIPQYGYLTLNNGSQAVGRSSFYCLEYFPSQMLRTGNNFQFSYTFEDVPFHSSYA |
| | HSQSLDRLMNPLIDQYLYFLSRTQTTGGTANTQTLQFSQAGPSSMANQARNWVPGPCYRQQ |
| | RVSTTTGQNNNSNFAWTAATKYHLNGRDSLMNPGVAMASHKDDEERFFPSNGVLIFGKQNA |
| | ARDNADYSDVMITNEEEIKTTNPVATEEYGAVADNLQQQNTAPQIGLVHNQGVLPGMVWQN |
| | RDVYLQGPIWAKIPHTDGNFHPSPLMGGFGLKHPPPQILIKNTPVPADPPTTFNQAKLNSF |
| | ITQYSTGQVSVEIEWELQKENSKRWNPEIQYTSNYYKSTSVDFAVNTEGVYSEPRPIGTRF |
| | LTRNL |
| 152 | MAADGYLPDWLEDNLSEGIREWWDLKPGAPKPKANQQKQDDGRGLVLPGYKYLGPFNGLDK |
| | GEPVNAADAAALEHDKAYDQQLKAGDNPYLRYNHADAEFQERLQEDTSFGGNLGRAVFQAK |
| | KRVLEPLGLVEEGAKTAPGKKRPVEQSPQEPDSSSGIGKTGQQPAKKRLNFGQTGDSESVP |
| | DPQPLGEPPAAPSGVGSNTMASGGGAPMADNNEGADGVGNSSGNWHCDSTWLGDRVITTST |
| | RTWALPTYNNHLYKQISNGTSGGATNDNTYFGYSTPWGYFDFNRFHCHFSPRDWQRLINNN |
| | WGFRPKRLNFKLFNIQVKEVTQNEGTKTIANNLTSTVQVFTDSEYQLPYVLGSAHQGCLPP |
| | FPADVFMIPQYGYLTLNNGSQAVGRSSFYCLEYFPSQMLRTGNNFQFSYTFEDVPFHSSYA |
| | HSQSLDRLMNPLIDQYLYFLSRTQTTGGTANTQTLQFSQGGPNTMANQARNWVPGPCYRQQ |
| | RVSTTTGQNNNSNFAWTAATKYHLNGRDSLMNPGVAMASHKDDEERFFPSNGVLIFGKQNA |
| | ARDNADYSDVMITNEEEIKTTNPVATEEYGAVADNLQQQNTAPQIGLVHNQGVLPGMVWQN |
| | RDVYLQGPIWAKIPHTDGNFHPSPLMGGFGLKHPPPQILIKNTPVPADPPTTFNQAKLNSF |
| | ITQYSTGQVSVEIEWELQKENSKRWNPEIQYTSNYYKSTSVDFAVNTEGVYSEPRPIGTRF |
| | LTRNL |
| 153 | MAADGYLPDWLEDNLSEGIREWWDLKPGAPKPKANQQKQDNGRGLVLPGYKYLGPFNGLDK |
| | GEPVNAADAAALEHDKAYDQQLKAGDNPYLRYNHADAEFQERLQEDTSFGGNLGRAVFQAK |
| | KRVLEPLGLVEEGAKTAPAKKRPVEPSPQRSPDSSTGIGKKGQQPARKRLNFGQTGDSESV |
| | PDPQPLGEPPAAPSSVGSGTVAAGGGAPMADNNEGADGVGNASGNWHCDSTWLGDRVITTS |
| | TRTWALPTYNNHLYKQISNGTSGGSTNDNTYFGYSTPWGYFDFNRFHCHFSPRDWQRLINN |
| | NWGFRPKKLRFKLFNIQVKEVTQNEGTKTIANNLTSTIQVFSDSEYQLPYVLGSAHQGCLP |
| | PFPADVFMIPQYGYLTLNNGSQSVGRSSFYCLEYFPSQMLRTGNNFEFSYSFEDVPFHSSY |
| | AHSQSLDRLMNPLIDQYLYYLARTQSTGGTAGTQQLQFYQGGPSTMAEQAKNWLPGPCFRQ |
| | QRVSTTLSQNNNSNFAWTGATKYHLNGRNSLVNPGVAMATHKDDEERFFPSSGVLIFGKQG |
| | AGKDNVDYSSVLMTNEEEIRPTNPVATEEYGIVADNLQQQNAAPIVQVVNNQGALPGMVWQ |
| | NRDVYLQGPIWAKIPHTDGNFHPSPLMGGFGLKHPPPQILIKNTPVPANPPEVFTPAKFAS |
| | FITQYSTGQVSVEIEWELQKENSKRWNPEIQYTSNYYKSTNVDFAVDSQGVYSEPRPIGTR |
| | YLTRNL |
| 154 | MAADGYLPDWLEDNLSEGIREWWDLKPGAPKPKANQQKQDNGRGLVLPGYKYLGPFNGLDK |
| | GEPVNAADAAALEHDKAYDQQLKAGDNPYLRYNHADAEFQERLQEDTSFGGNLGRAVFQAK |
| | KRVLEPLGLVEEGAKTAPAKKRPVEPSPQRSPDSSTGIGKKGQQPARKRLNFGQTGDSESV |
| | PDPQPLGEPPAAPSSVGSGTVAAGGGAPMADNNEGADGVGNASGNWHCDSTWLGDRVITTS |
| | TRTWALPTYNNHLYKQISNGTSGGSTNDNTYFGYSTPWGYFDFNRFHCHFSPRDWQRLINN |
| | NWGFRPKKLRFKLFNIQVKEVTQNEGTKTIANNLTSTIQVFSDSEYQLPYVLGSAHQGCLP |
| | PFPADVFMIPQYGYLTLNNGSQSVGRSSFYCLEYFPSQMLRTGNNFEFSYSFEDVPFHSSY |
| | AHSQSLDRLMNPLIDQYLYYLARTQSTGGTAGTQQLQFYQAGPNNMSAQAKNWLPGPCFRQ |
| | QRVSTTLSQNNNSNFAWTGATKYHLNGRNSLVNPGVAMATHKDDEERFFPSSGVLIFGKQG |
| | AGKDNVDYSSVLMTNEEEIRPTNPVATEEYGIVADNLQQQNAAPIVQVVNNQGALPGMVWQ |
| | NRDVYLQGPIWAKIPHTDGNFHPSPLMGGFGLKHPPPQILIKNTPVPANPPEVFTPAKFAS |
| | FITQYSTGQVSVEIEWELQKENSKRWNPEIQYTSNYYKSTNVDFAVDSQGVYSEPRPIGTR |
| | YLTRNL |
| 155 | MAADGYLPDWLEDNLSEGIREWWDLKPGAPKPKANQQKQDNGRGLVLPGYKYLGPFNGLDK |
| | GEPVNAADAAALEHDKAYDQQLKAGDNPYLRYNHADAEFQERLQEDTSFGGNLGRAVFQAK |
| | KRVLEPLGLVEEGAKTAPAKKRPVEPSPQRSPDSSTGIGKKGQQPARKRLNFGQTGDSESV |
| | PDPQPLGEPPAAPSSVGSGTVAAGGGAPMADNNEGADGVGNASGNWHCDSTWLGDRVITTS |
| | TRTWALPTYNNHLYKQISNGTSGGSTNDNTYFGYSTPWGYFDFNRFHCHFSPRDWQRLINN |
| | NWGFRPKKLRFKLFNIQVKEVTQNEGTKTIANNLTSTIQVFSDSEYQLPYVLGSAHQGCLP |
| | PFPADVFMIPQYGYLTLNNGSQSVGRSSFYCLEYFPSQMLRTGNNFEFSYSFEDVPFHSSY |
| | AHSQSLDRLMNPLIDQYLYYLSRTQSTGGTAGTQQLLFSQAGPNNMSAQAKNWLPGPCYRQ |
| | QRVSTTLSQNNNSNFAWTGATKYHLNGRDSLVNPGVAMATHKDDEERFFPSSGVLMFGKQG |
| | AGKDNVDYSSVMLTSEEEIKTTNPVATEQYGVVADNLQQQNAAPIVGAVNSQGALPGMVWQ |
| | NRDVYLQGPIWAKIPHTDGNFHPSPLMGGFGLKHPPPQILIKNTPVPANPPEVFTPAKFAS |
| | FITQYSTGQVSVEIEWELQKENSKRWNPEIQYTSNYYKSTNVDFAVDSQGVYSEPRPIGTR |
| | YLTRNL |
| 156 | MAADGYLPDWLEDNLSEGIREWWALKPGAPQPKANQQHQDNARGLVLPGYKYLGPGNGLDK |
| | GEPVNAADAAALEHDKAYDQQLKAGDNPYLKYNHADAEFQERLKEDTSFGGNLGRAVFQAK |
| | KRLLEPLGLVEEAAKTAPGKKRPVEQSPQEPDSSAGIGKSGAQPAKKRLNFGQTGDTESVP |
| | DPQPIGEPPAAPSGVGSLTMASGGGAPVADNNEGADGVGSSSGNWHCDSQWLGDRVITTST |
| | RTWALPTYNNHLYKQISNGTSGGSTNDNAYFGYSTPWGYFDFNRFHCHFSPRDWQRLINNN |
| | WGFRPKRLNFKLFNIQVKEVTQNEGTKTIANNLTSTVQVFTDSDYQLPYVLGSAHEGCLPP |
| | FPADVFMIPQYGYLTLNNGSQAVGRSSFYCLEYFPSQMLRTGNNFQFSYEFENVPFHSSYA |
| | HSQSLDRLMNPLIDQYLYYLSKTISTGGTAGTQQLKFSVAGPSNMAVQGRNYIPGPSYRQQ |
| | RVSTTLSQNNNSNFAWTGASSWALNGRNSLMNPGPAMATHKDDEERFFPSSGSLIFGKQGA |
| | GKDNVDYSSVMITNEEEIKTTNPVATESYGQVADNLQQQNAAPIVGWVQNQGILPGMVWQD |
| | RDVYLQGPIWAKIPHTDGNFHPSPLMGGFGMKHPPPQILIKNTPVPADPPTAFNKDKLNSF |
| | ITQYSTGQVSVEIEWELQKENSKRWNPEIQYTSNYYKSTNVDFAVNTEGVYSEPRPIGTRY |
| | LTRNL |
| 157 | MAADGYLPDWLEDNLSEGIREWWALKPGAPQPKANQQHQDNARGLVLPGYKYLGPGNGLDK |
| | GEPVNAADAAALEHDKAYDQQLKAGDNPYLKYNHADAEFQERLKEDTSFGGNLGRAVFQAK |
| | KRLLEPLGLVEEAAKTAPGKKRPVEQSPQEPDSSAGIGKSGAQPAKKRLNFGQTGDTESVP |
| | DPQPIGEPPAAPSGVGSLTMASGGGAPVADNNEGADGVGSSSGNWHCDSQWLGDRVITTST |
| | RTWALPTYNNHLYKQISNGTSGGSTNDNAYFGYSTPWGYFDFNRFHCHFSPRDWQRLINNN |
| | WGFRPKRLNFKLFNIQVKEVTQNEGTKTIANNLTSTVQVFTDSDYQLPYVLGSAHEGCLPP |
| | FPADVFMIPQYGYLTLNNGSQAVGRSSFYCLEYFPSQMLRTGNNFQFSYEFENVPFHSSYA |
| | HSQSLDRLMNPLIDQYLYYLSRTQSTGGTAGTQQLLFSQAGPNNMSAQAKNWLPGPCYRQQ |
| | RVSTTLSQNNNSNFAWTGATKYHLNGRDSLVNPGVAMATHKDDEERFFPSSGVLMFGKQGA |
| | GKDNVDYSSVMLTSEEEIKTTNPVATEQYGVVADNLQQQNAAPIVGAVNSQGALPGMVWQD |
| | RDVYLQGPIWAKIPHTDGNFHPSPLMGGFGMKHPPPQILIKNTPVPADPPTAFNKDKLNSF |
| | ITQYSTGQVSVEIEWELQKENSKRWNPEIQYTSNYYKSTNVDFAVNTEGVYSEPRPIGTRY |
| | LTRNL |

[0323] Numerous modifications and variations in the disclosure as set forth in the above illustrative examples are expected to occur to those skilled in the art. Consequently only such limitations as appear in the appended claims should be placed on the disclosure.

1. A method of treating a subject with multiple doses of a recombinant adeno-associated virus (rAAV) vector, the method comprising:
administering to a subject a first rAAV vector comprising a first capsid and a transgene encoding a therapeutic molecule, and
administering to the subject a second rAAV vector comprising a second capsid and a transgene encoding a therapeutic molecule,
wherein the transgene in the second rAAV vector encodes the same therapeutic molecule or a different therapeutic molecule as the transgene in the first rAAV vector.

2. A method of treating a disease or disorder in a subject in need thereof with multiple doses of a recombinant adeno-associated virus (rAAV) vector, the method comprising:
administering to a subject a first rAAV vector comprising a first capsid and a transgene encoding a therapeutic molecule useful for treating the disease or disorder, and
administering to the subject a second rAAV vector comprising a second capsid and a transgene encoding a therapeutic molecule useful for treating the disease or disorder,
wherein the transgene in the second capsid encodes the same therapeutic molecule or a different therapeutic molecule useful to treat the disease or disorder as the transgene in the first rAAV vector.

3. The method of claim 1, wherein the first and second capsids are phylogenetically distinct.

4. The method of claim 3, wherein the phylogenetic difference is based on a threshold level of sequence homology.

5. The method of claim 1, wherein the first and second capsids have amino acid sequence homology that is less than or equal to about 90%.

6. The method of claim 1, wherein the first and second capsids have less than or equal to about 85% homology in a VP1 capsid protein and/or less than or equal to about 85% homology in a VP3 capsid protein.

7. The method of claim 1, wherein the first capsid and/or second capsid exhibit low pre-existing immunity in the subject.

8. The method of claim 1, wherein the subject is human.

9. The method of claim 1, wherein the subject is human and is immunologically naïve to the first and/or second AAV vector.

10. The method of claim 9, wherein the subject has less than 1:2, 1:5, 1:10, 1:20, 1:50, 1:100, 1:200 or 1:300, 1:500, 1:1000 neutralizing antibody to the first or second AAV vector in serum.

11. The method of claim 10, wherein the neutralizing antibody levels are measured in a neutralizing antibody assay.

12. The method of claim 1, wherein the first capsid or second capsid is selected from the group consisting of AAV1, AAV2, AAV3, AAV4, AAV5, AAV6, AAV7, AAV8, AAV9, AAV10, AAV11, AAV12, AAV13, AAV3b, LK03, rh74.j, rh10, bovine, AAVGoat, Bba.41, Bba.47, Bba.49, Bba.33, Bba.45, Bba.46, Bba.50, Bba.51, RN35, Anc110_9VR, AAV_go.1, AAVs listed in Table 4, AAV listed in Table 5, and/or variants thereof.

13. (canceled)

14. (canceled)

15. The method of claim 1, wherein the first capsid and/or second capsid is an engineered or chimeric capsid.

16. The method of claim 1, wherein the first or second capsid comprises a chimeric capsid protein having a VP1 amino acid sequence of a recipient backbone AAV capsid comprising variable regions I, II, III, IV, V, VI, VII, VIII and IX, except wherein one or more of variable regions I, II, III, IV, V, VI, VII, VIII, or IX is replaced by the corresponding variable region from one or more donor AAV capsids.

17. (canceled)

18. The method of claim 16, wherein the VP1 amino acid sequence of the recipient backbone AAV capsid is any of SEQ ID NOS:1-89 or 158-164 and the corresponding variable region from one or more donor AAV capsids is from SEQ ID NOS:1-89 or 158-164, and the recipient backbone AAV capsid sequence and the donor AAV capsid sequences are different.

19. The method of claim 15, wherein the chimeric capsid comprises the amino acid sequence of any one of SEQ ID NOS:90-157.

20. The method of claim 1, wherein the first or second capsid comprises an amino acid sequence that is at least 95% identical to (i) any one of SEQ ID NOs:15-89 or 158-164, (ii) the VP2 region of any one of SEQ ID NOs: 15-89 or 158-164, or (iii) the VP3 region of any one of SEQ ID NOs: 15-89 or 158-164.

21. The method of claim 1, wherein the first or second capsid comprises the amino acid sequence of (i) any one of SEQ ID NOS:15-89, (ii) the VP2 region of any one of SEQ ID NOS:15-89, or (iii) the VP3 region of any one of SEQ ID NOS:15-89.

22. The method of claim 1, wherein the first or second rAAV vector comprises a nucleic acid sequence encoding an adeno-associated virus (AAV) capsid protein having an amino acid sequence that is at least 95% identical to (i) any one of SEQ ID NOS:15-89 or 158-164, (ii) the VP2 region of any one of SEQ ID NOS:15-89 or 158-164, or (iii) the VP3 region of any one of SEQ ID NOS:15-89 or 158-164.

23. The method of claim 22, wherein the nucleic acid sequence is operably linked to a heterologous regulatory element that controls expression of the transgene in a host cell.

24. The method of claim 23, wherein the host cell is a liver cell or muscle cell.

25. The method of claim 1, wherein the first capsid is selected from the group consisting of AA5, Bba.49, Bb47 and bovine and the second capsid is selected from the group consisting of AA5, Bba.49, Bb47 and bovine.

26. The method of claim 1, wherein the first capsid is selected from the group consisting of LK03, AA5, Bba.49 and bovine, and the second capsid is selected from the group consisting of LK03, AAV5, Bba.49 and bovine.

27. The method of claim 1, wherein the first capsid is selected from the group consisting of rh10, AA5, Bba.49 and bovine, and the second capsid is selected from the group consisting of rh10, AAV5, Bba.49 and bovine.

28. The method of claim 1, wherein the first capsid is selected from the group consisting of AAV8, AA5, Bba.49 and bovine, and the second capsid is selected from the group consisting of AAV8, AAV5, Bba.49 and bovine.

29. The method of claim 1, wherein the first capsid or second capsid is AAV9 or Bba.41.

30. The method of claim 1, wherein the transgene expresses a heterologous protein that is maintained in the subject at a therapeutically effective level.

31. The method of claim 30, wherein the heterologous protein is selected from the group consisting of Factor VIII, Factor IX, ATP7B protein, C1 esterase inhibitor (C1-INH), alpha 1 antitrypsin, and galactose-1-phosphate uridyl transferase (GALT), dystrophin, a mini-dystrophin, microdystrophin, phenylalanine hydroxylase (PAH), alpha-galactosidase A, and glucocerebrosidase.

32. The method of claim 31, wherein expression of the heterologous protein is sufficient to treat a disorder or disease selected from the group consisting of hemophilia A, hemophilia B, Wilson's disease, hereditary angioedema (HAE), alpha 1 antitrypsin deficiency, galactosemia, Duchenne's Muscular Dystrophy or other muscular dystrophies, phenylketonuria (PKU), Fabry Disease, and Gaucher Disease.

The application's sequence listing, which the Patent Office published only in electronic form, follows.

SEQUENCE LISTING (173 sequences)

SEQ ID NO: 1 - protein, 736 aa, Adeno-Associated Virus
MSFVDHPPDWLESIGDGFREFLGLEAGPPKPKANQQKQDNARGLVLPGYKYLGPGNGLDKGDPVNFADEVAREHDLSYQKQLEAGDNPYLKYNHADAEFQEKLASDTSFGGNLGKAVFQAKKRILEPLGLVETPDKTAPAAKKRPLEQSPQEPDSSSGVGKKGKQPARKRLNFDDEPGAGDGPPPEGPSSGAMSTETEMRAAAGGNGGDAGQGAEGVGNASGDWHCDSTWSESHVTTTSTRTWVLPTYNNHLYLRLGSSNASDTFNGFSTPWGYFDFNRFHCHFSPRDWQRLINNHWGLRPKSMQVRIFNIQVKEVTTSNGETTVSNNLTSTVQIFADSTYELPYVMDAGQEGSLPPFPNDVFMVPQYGYCGLVTGGSSQNQTDRNAFYCLEYFPSQMLRTGNNFEMVYKFENVPFHSMYAHSQSLDRLMNPLLDQYLWELQSTTSGGTLNQGNSATNFAKLTKTNFSGYRKNWLPGPMMKQQRFSKTASQNYKIPQGRNNSLLHYETRTTLDGRWSNFAPGTAMATAANDATDFSQAQLIFAGPNITGNTTTDANNLMFTSEDELRATNPRDTDLFGHLATNQQNATTVPTVDDVDGVGVYPGMVWQDRDIYYQGPIWAKIPHTDGHFHPSPLIGGFGLKSPPPQIFIKNTPVPANPATTFSPARINSFITQYSTGQVAVKIEWEIQKERSKRWNPEVQFTSNYGAQDSLLWAPDNAGAYKEPRAIGSRYLTNHL

SEQ ID NO: 2 - protein, 713 aa, Adeno-Associated Virus
MSFFDWLGKQYAQGAAEFWDLKSGPPAPKKARKDGSAGFNFPGHKYLGPGNSLDRGDPVDADDAAAQKHDQSYQEQLEAGDNPYLKYNHADREFQEALKDDTSFEGNLARGLFEAKKLVAEPLGLVEPELAPPSGRKRPVQSSQESGYSSSQDKRPNLDVDEEDREFAAAAAETETGSAPPTGNLGPGTMAGGGSAPIDDGSYGADGVGNASGDWHCDSTWLDNCVITRTTRTWNLPTYNNHIYKRLNGTTSGDQSYFGFSTPWGYFDFNRFHCHFSPRDWQRLINNNWGLRPKSLRFKIFNIQVKEVTTQDSTKIISNNLTSTVQVFADTEYQLPYVIGSAHEGCLPPFPADVFMLPQYGYCTRQDGNSNNPTPRSAFYCLEYFPSKMLRTGNSFEFTYNFEKVPFHSMWAHNQSLDRLMNPLIDQYLYYLDVTSSTGFTYQKGVHTNLPEQERNWLPGPGIRNQAWFNSATGNNPLTGTWQYSNKYVLENRASKIAPGPAMGIESTKFDGNGIIFSKEYITNVNTANPNQVNITRETEINSTNPLAGGSLGAHANNSQNTTTAPTLDHTNVMGVFPGSVWQDRDIYLQGQIWAKIPHTDGHFHPSPLMGGFGLKNPPPQILIKNTPVPADPPTEFNANKISSFITQYSTGQVTVEMEWELQKETSKRWNPEIQYSDDSSSTSGSILHFAPDDVGNYKEFRSIGTRYLTRPL

SEQ ID NO: 3 - protein, 735 aa, Adeno-Associated Virus [sequence omitted]

SEQ ID NO: 4 - protein, 734 aa, Adeno-Associated Virus
MTDGYLPDWLEDNLSEGVREWWALQPGAPKPKANQQHQDNARGLVLPGYKYLGPGNGLDKGEPVNAADAAALEHDKAYDQQLKAGDNPYLKYNHADAEFQQRLQGDTSFGGNLGRAVFQAKKRVLEPLGLVEQAGETAPGKKRPLIESPQQPDSSTGIGKKGKQPAKKKLVFEDETGAGDGPPEGSTSGAMSDDSEMRAAAGGAAVEGGQGADGVGNASGDWHCDSTWSEGHVTTTSTRTWVLPTYNNHLYKRLGESLQSNTYNGFSTPWGYFDFNRFHCHFSPRDWQRLINNNWGMRPKAMRVKIFNIQVKEVTTSNGETTVANNLTSTVQIFADSSYELPYVMDAGQEGSLPPFPNDVFMVPQYGYCGLVTGNTSQQQTDRNAFYCLEYFPSQMLRTGNNFEITYSFEKVPFHSMYAHSQSLDRLMNPLIDQYLWGLQSTTTGTTLNAGTATTNFTKLRPTNFSNFKKNWLPGPSIKQQGFSKTANQNYKIPATGSDSLIKYETHSTLDGRWSALTPGPPMATAGPADSKFSNSQLIFAGPKQNGNTATVPGTLIFTSEEELAATNATDTDMWGNLPGGDQSNSNLPTVDRLTALGAVPGMVWQNRDIYYQGPIWAKIPHTDGHFHPSPLIGGFGLKHPPPQIFIKNTPVPANPATTFSSTPVNSFITQYSTGQVSVQIDWEIQKERSKRWNPEVQFTSNYGQQNSLLWAPDAAGKYTEPRAIGTRYLTHHL

SEQ ID NO: 5 - protein, 724 aa, Adeno-Associated Virus
MSFVDHPPDWLEEVGEGLREFLGLEAGPPKPKPNQQHQDQARGLVLPGYNYLGPGNGLDRGEPVNRADEVAREHDISYNEQLEAGDNPYLKYNHADAEFQEKLADDTSFGGNLGKAVFQAKKRVLEPFGLVEEGAKTAPTGKRIDDHFPKRKKARTEEDSKPSTSSDAEAGPSGSQQLQIPAQPASSLGADTMSAGGGGPLGDNNQGADGVGNASGDWHCDSTWMGDRVVTKSTRTWVLPSYNNHQYREIKSGSVDGSNANAYFGYSTPWGYFDFNRFHSHWSPRDWQRLINNYWGFRPRSLRVKIFNIQVKEVTVQDSTTTIANNLTSTVQVFTDDDYQLPYVVGNGTEGCLPAFPPQVFTLPQYGYATLNRDNTENPTERSSFFCLEYFPSKMLRTGNNFEFTYNFEEVPFHSSFAPSQNLFKLANPLVDQYLYRFVSTNNTGGVQFNKNLAGRYANTYKNWFPGPMGRTQGWNLGSGVNRASVSAFATTNRMELEGASYQVPPQPNGMTNNLQGSNTYALENTMIFNSQPANPGTTATYLEGNMLITSESETQPVNRVAYNVGGQMATNNQSSTTAPATGTYNLQEIVPGSVWMERDVYLQGPIWAKIPETGAHFHPSPAMGGFGLKHPPPMMLIKNTPVPGNITSFSDVPVSSFITQYSTGQVTVEMEWELKKENSKRWNPEIQYTNNYNDPQFVDFAPDSTGEYRTTRPIGTRYLTRPL

SEQ ID NO: 6 - protein, 736 aa, Adeno-Associated Virus
MAADGYLPDWLEDNLSEGIREWWDLKPGAPKPKANQQKQDDGRGLVLPGYKYLGPFNGLDKGEPVNAADAAALEHDKAYDQQLKAGDNPYLRYNHADAEFQERLQEDTSFGGNLGRAVFQAKKRVLEPFGLVEEGAKTAPGKKRPVEQSPQEPDSSSGIGKTGQQPAKKRLNFGQTGDSESVPDPQPLGEPPATPAAVGPTTMASGGGAPMADNNEGADGVGNASGNWHCDSTWLGDRVITTSTRTWALPTYNNHLYKQISSASTGASNDNHYFGYSTPWGYFDFNRFHCHFSPRDWQRLINNNWGFRPKRLNFKLFNIQVKEVTTNDGVTTIANNLTSTVQVFSDSEYQLPYVLGSAHQGCLPPFPADVFMIPQYGYLTLNNGSQAVGRSSFYCLEYFPSQMLRTGNNFTFSYTFEDVPFHSSYAHSQSLDRLMNPLIDQYLYYLNRTQNQSGSAQNKDLLFSRGSPAGMSVQPKNWLPGPCYRQQRVSKTKTDNNNSNFTWTGASKYNLNGRESIINPGTAMASHKDDKDKFFPMSGVMIFGKESAGASNTALDNVMITDEEEIKATNPVATERFGTVAVNLQSSSTDPATGDVHVMGALPGMVWQDRDVYLQGPIWAKIPHTDGHFHPSPLMGGFGLKHPPPQILIKNTPVPANPPAEFSATKFASFITQYSTGQVSVEIEWELQKENSKRWNPEVQYTSNYAKSANVDFTVDNNGLYTEPRPIGTRYLTRPL

SEQ ID NO: 7 - protein, 736 aa, Adeno-Associated Virus
MAADGYLPDWLEDNLSEGIREWWDLKPGAPKPKANQQKQDDGRGLVLPGYKYLGPFNGLDKGEPVNAADAAALEHDKAYDQQLKAGDNPYLRYNHADAEFQERLQEDTSFGGNLGRAVFQAKKRVLEPLGLVEEGAKTAPGKKRPVEQSPQEPDSSSGIGKTGQQPAKKRLNFGQTGDSESVPDPQPLGEPPATPAAVGPTTMASGGGAPMADNNEGADGVGNASGNWHCDSTWLGDRVITTSTRTWALPTYNNHLYKQISSASTGASNDNHYFGYSTPWGYFDFNRFHCHFSPRDWQRLINNNWGFRPKRLNFKLFNIQVKEVTTNDGVTTIANNLTSTVQVFSDSEYQLPYVLGSAHQGCLPPFPADVFMIPQYGYLTLNNGSQAVGRSSFYCLEYFPSQMLRTGNNFTFSYTFEDVPFHSSYAHSQSLDRLMNPLIDQYLYYLNRTQNQSGSAQNKDLLFSRGSPAGMSVQPKNWLPGPCYRQQRVSKTKTDNNNSNFTWTGASKYNLNGRESIINPGTAMASHKDDKDKFFPMSGVMIFGKESAGASNTALDNVMITDEEEIKATNPVATERFGTVAVNLQSSSTDPATGDVHVMGALPGMVWQDRDVYLQGPIWAKIPHTDGHFHPSPLMGGFGLKHPPPQILIKNTPVPANPPAEFSATKFASFITQYSTGQVSVEIEWELQKENSKRWNPEVQYTSNYAKSANVDFTVDNNGLYTEPRPIGTRYLTRPL

SEQ ID NO: 8 - protein, 737 aa, Adeno-Associated Virus
MAADGYLPDWLEDNLSEGIREWWDLKPGAPKPKANQQKQDNGRGLVLPGYKYLGPFNGLDKGEPVNAADAAALEHDKAYDQQLKAGDNPYLRYNHADAEFQERLQEDTSFGGNLGRAVFQAKKRVLEPLGLVEEGAKTAPAKKRPVEPSPQRSPDSSTGIGKKGQQPARKRLNFGQTGDSESVPDPQPLGEPPAAPSSVGSGTVAAGGGAPMADNNEGADGVGNASGNWHCDSTWLGDRVITTSTRTWALPTYNNHLYKQISSETAGSTNDNTYFGYSTPWGYFDFNRFHCHFSPRDWQRLINNNWGFRPKKLRFKLFNIQVKEVTTNDGVTTIANNLTSTIQVFSDSEYQLPYVLGSAHQGCLPPFPADVFMIPQYGYLTLNNGSQSVGRSSFYCLEYFPSQMLRTGNNFEFSYSFEDVPFHSSYAHSQSLDRLMNPLIDQYLYYLARTQSNPGGTAGNRELQFYQGGPSTMAEQAKNWLPGPCFRQQRVSKTLDQNNNSNFAWTGATKYHLNGRNSLVNPGVAMATHKDDEDRFFPSSGVLIFGKTGATNKTTLENVLMTNEEEIRPTNPVATEEYGIVSSNLQAANTAAQTQVVNNQGALPGMVWQNRDVYLQGPIWAKIPHTDGNFHPSPLMGGFGLKHPPPQILIKNTPVPANPPEVFTPAKFASFITQYSTGQVSVEIEWELQKENSKRWNPEIQYTSNFEKQTGVDFAVDSQGVYSEPRPIGTRYLTRNL

SEQ ID NO: 9 - protein, 738 aa, Adeno-Associated Virus
MAADGYLPDWLEDNLSEGIREWWALKPGAPKPKANQQKQDDGRGLVLPGYKYLGPFNGLDKGEPVNAADAAALEHDKAYDQQLQAGDNPYLRYNHADAEFQERLQEDTSFGGNLGRAVFQAKKRVLEPLGLVEEGAKTAPGKKRPVEPSPQRSPDSSTGIGKKGQQPARKRLNFGQTGDSESVPDPQPLGEPPAAPSGVGPNTMAAGGGAPMADNNEGADGVGSSSGNWHCDSTWLGDRVITTSTRTWALPTYNNHLYKQISNGTSGGATNDNTYFGYSTPWGYFDFNRFHCHFSPRDWQRLINNNWGFRPKRLSFKLFNIQVKEVTQNEGTKTIANNLTSTIQVFTDSEYQLPYVLGSAHQGCLPPFPADVFMIPQYGYLTLNNGSQAVGRSSFYCLEYFPSQMLRTGNNFQFTYTFEDVPFHSSYAHSQSLDRLMNPLIDQYLYYLSRTQTTGGTANTQTLGFSQGGPNTMANQAKNWLPGPCYRQQRVSTTTGQNNNSNFAWTAGTKYHLNGRNSLANPGIAMATHKDDEERFFPSNGILIFGKQNAARDNADYSDVMLTSEEEIKTTNPVATEEYGIVADNLQQQNTAPQIGTVNSQGALPGMVWQNRDVYLQGPIWAKIPHTDGNFHPSPLMGGFGLKHPPPQILIKNTPVPADPPTTFNQSKLNSFITQYSTGQVSVEIEWELQKENSKRWNPEIQYTSNYYKSTSVDFAVNTEGVYSEPRPIGTRYLTRNL

SEQ ID NO: 10 - protein, 736 aa, Adeno-Associated Virus
MAADGYLPDWLEDNLSEGIREWWALKPGAPQPKANQQHQDNARGLVLPGYKYLGPGNGLDKGEPVNAADAAALEHDKAYDQQLKAGDNPYLKYNHADAEFQERLKEDTSFGGNLGRAVFQAKKRLLEPLGLVEEAAKTAPGKKRPVEQSPQEPDSSAGIGKSGAQPAKKRLNFGQTGDTESVPDPQPIGEPPAAPSGVGSLTMASGGGAPVADNNEGADGVGSSSGNWHCDSQWLGDRVITTSTRTWALPTYNNHLYKQISNSTSGGSSNDNAYFGYSTPWGYFDFNRFHCHFSPRDWQRLINNNWGFRPKRLNFKLFNIQVKEVTDNNGVKTIANNLTSTVQVFTDSDYQLPYVLGSAHEGCLPPFPADVFMIPQYGYLTLNDGSQAVGRSSFYCLEYFPSQMLRTGNNFQFSYEFENVPFHSSYAHSQSLDRLMNPLIDQYLYYLSKTINGSGQNQQTLKFSVAGPSNMAVQGRNYIPGPSYRQQRVSTTVTQNNNSEFAWPGASSWALNGRNSLMNPGPAMASHKEGEDRFFPLSGSLIFGKQGTGRDNVDADKVMITNEEEIKTTNPVATESYGQVATNHQSAQAQAQTGWVQNQGILPGMVWQDRDVYLQGPIWAKIPHTDGNFHPSPLMGGFGMKHPPPQILIKNTPVPADPPTAFNKDKLNSFITQYSTGQVSVEIEWELQKENSKRWNPEIQYTSNYYKSNNVEFAVNTEGVYSEPRPIGTRYLTRNL

SEQ ID NO: 11 - protein, 736 aa, Adeno-Associated Virus
MAADGYLPDWLEDNLSEGIREWWDLKPGAPKPKANQQKQDDGRGLVLPGYKYLGPFNGLDKGEPVNAADAAALEHDKAYDQQLKAGDNPYLRYNHADAEFQERLQEDTSFGGNLGRAVFQAKKRVLEPLGLVEEGAKTAPGKKRPVEQSPQEPDSSSGIGKTGQQPAKKRLNFGQTGDSESVPDPQPLGEPPAAPSGLGPNTMASGGGAPMADNNEGADGVGNSSGNWHCDSTWLGDRVITTSTRTWALPTYNNHLYKQISNGTSGGSTNDNTYFGYSTPWGYFDFNRFHCHFSPRDWQRLINNNWGFRPKRLNFKLFNIQVKEVTTNEGTKTIANNLTSTVQVFTDSEYQLPYVLGSAHQGCLPPFPADVFMVPQYGYLTLNNGSQALGRSSFYCLEYFPSQMLRTGNNFQFSYTFEDVPFHSSYAHSQSLDRLMNPLIDQYLYYLVRTQTTGTGGTQTLAFSQAGPSSMANQARNWVPGPCYRQQRVSTTTNQNNNSNFAWTGAAKFKLNGRDSLMNPGVAMASHKDDDDRFFPSSGVLIFGKQGAGNDGVDYSQVLITDEEEIKATNPVATEEYGAVAINNQAANTQAQTGLVHNQGVIPGMVWQNRDVYLQGPIWAKIPHTDGNFHPSPLMGGFGLKHPPPQILIKNTPVPADPPLTFNQAKLNSFITQYSTGQVSVEIEWELQKENSKRWNPEIQYTSNYYKSTNVDFAVNTEGVYSEPRPIGTRYLTRNL

SEQ ID NO: 12 - protein, 738 aa, Adeno-Associated Virus
MAADGYLPDWLEDNLSEGIREWWDLKPGAPKPKANQQKQDDGRGLVLPGYKYLGPFNGLDKGEPVNAADAAALEHDKAYDQQLKAGDNPYLRYNHADAEFQERLQEDTSFGGNLGRAVFQAKKRVLEPLGLVEEGAKTAPGKKRPVEPSPQRSPDSSTGIGKKGQQPAKKRLNFGQTGDSESVPDPQPIGEPPAGPSGLGSGTMAAGGGAPMADNNEGADGVGSSSGNWHCDSTWLGDRVITTSTRTWALPTYNNHLYKQISNGTSGGSTNDNTYFGYSTPWGYFDFNRFHCHFSPRDWQRLINNNWGFRPKRLNFKLFNIQVKEVTQNEGTKTIANNLTSTIQVFTDSEYQLPYVLGSAHQGCLPPFPADVFMIPQYGYLTLNNGSQAVGRSSFYCLEYFPSQMLRTGNNFEFSYQFEDVPFHSSYAHSQSLDRLMNPLIDQYLYYLSRTQSTGGTAGTQQLLFSQAGPNNMSAQAKNWLPGPCYRQQRVSTTLSQNNNSNFAWTGATKYHLNGRDSLVNPGVAMATHKDDEERFFPSSGVLMFGKQGAGKDNVDYSSVMLTSEEEIKTTNPVATEQYGVVADNLQQQNAAPIVGAVNSQGALPGMVWQNRDVYLQGPIWAKIPHTDGNFHPSPLMGGFGLKHPPPQILIKNTPVPADPPTTFSQAKLASFITQYSTGQVSVEIEWELQKENSKRWNPEIQYTSNYYKSTNVDFAVNTDGTYSEPRPIGTRYLTRNL

SEQ ID NO: 13 - protein, 736 aa, Adeno-Associated Virus
MAADGYLPDWLEDNLSEGIREWWDLKPGAPKPKANQQKQDDGRGLVLPGYKYLGPFNGLDKGEPVNAADAAALEHDKAYDQQLKAGDNPYLRYNHADAEFQERLQEDTSFGGNLGRAVFQAKKRVLEPLGLVEEGAKTAPGKKRPVEQSPQEPDSSSGIGKKGQQPARKRLNFGQTGDSESVPDPQPLGEPPAAPSGVGSNTMAAGGGAPMADNNEGADGVGNASGNWHCDSTWLGDRVITTSTRTWALPTYNNHLYKQISSQSGGSTNDNTYFGYSTPWGYFDFNRFHCHFSPRDWQRLINNNWGFRPKKLNFKLFNIQVKEVTTNDGTTTIANNLTSTVQVFTDSEYQLPYVLGSAHQGCLPPFPADVFMIPQYGYLTLNNGSQAVGRSSFYCLEYFPSQMLRTGNNFQFSYTFEDVPFHSSYAHSQSLDRLMNPLIDQYLYYLSRTQTTSGTAGNRTLQFSQAGPSSMANQAKNWLPGPCYRQQRVSKTTNQNNNSNFAWTGATKYHLNGRDSLVNPGPAMATHKDDEDKFFPMSGVLIFGKQGAGNSNVDLDNVMITNEEEIKTTNPVATEEYGTVATNLQSANTAPATGTVNSQGALPGMVWQDRDVYLQGPIWAKIPHTDGHFHPSPLMGGFGLKHPPPQILIKNTPVPANPPTTFSPAKFASFITQYSTGQVSVEIEWELQKENSKRWNPEIQYTSNYNKSTNVDFAVDTNGVYSEPRPIGTRYLTRNL

SEQ ID NO: 14 - protein, 736 aa, Adeno-Associated Virus
MAADGYLPDWLEDNLSEGIREWWDLKPGAPKPKANQQKQDDGRGLVLPGYKYLGPFNGLDKGEPVNAADAAALEHDKAYDQQLKAGDNPYLRYNHADAEFQERLQEDTSFGGNLGRAVFQAKKRVLEPLGLVEEGAKTAPGKKRPVEQSPQEPDSSSGIGKTGQQPAKKRLNFGQTGDSESVPDPQPLGEPPAAPSGVGSNTMASGGGAPMADNNEGADGVGNSSGNWHCDSTWLGDRVITTSTRTWALPTYNNHLYKQISNGTSGGSTNDNTYFGYSTPWGYFDFNRFHCHFSPRDWQRLINNNWGFRPKRLNFKLFNIQVKEVTTNEGTKTIANNLTSTVQVFTDSEYQLPYVLGSAHQGCLPPFPADVFMIPQYGYLTLNNGSQAVGRSSFYCLEYFPSQMLRTGNNFQFSYTFEDVPFHSSYAHSQSLDRLMNPLIDQYLYYLSRTQTTGTAGTQTLQFSQAGPSSMANQARNWVPGPCYRQQRVSTTTNQNNNSNFAWTGATKYHLNGRDSLMNPGVAMASHKDDEDRFFPSSGVLIFGKQGAGNDNVDYSQVMITNEEEIKTTNPVATEEYGAVATNNQSANTQAQTGLVHNQGVLPGMVWQNRDVYLQGPIWAKIPHTDGNFHPSPLMGGFGLKHPPPQILIKNTPVPADPPTTFNQAKLNSFITQYSTGQVSVEIEWELQKENSKRWNPEIQYTSNYYKSTNVDFAVNTEGVYSEPRPIGTRYLTRNL

SEQ ID NO: 15 - protein, 742 aa, Papio hamadryas
MAADGYLPDWLEDNLSEGIREWWALKPGAPQPKANQQHQDNARGLVLPGYKYLGPGNGLDKGEPVNEADAAALEHDKAYDQQLKSGDNPYLKYNHADAEFQQRLATDTSFGGNLGKAVFQAKKRILEPLGLVEEGVKTAPGKKRPLEKTPNRPTNPDSGKAPAKKKQKDGETADSARRTLDFEDSGAGDGPPEGSSSGEMSHDAEMRAAPGGNAVEAGQGADGVGNASGDWHCDSTWSEGRVTTTSTRTWVLPTYNNHLYLRIGTTANSNTYNGFSTPWGYFDFNRFHCHFSPRDWQRLINNNWGLRPKSMRVKIFNIQVKEVTTSNGETTVANNLTSTVQIFADSTYELPYVMDAGQEGSLPPFPNDVFMVPQYGYCGVVTGENQNQTDRNAFYCLEYFPSQMLRTGNNFEVSYQFEKVPFHSMYAHSQSLDRMMNPLLDQYLWHPQSTTTGNSLNQGTATTTYGKITTGDFAYYRKNWLPGACIKQQKFSKNASQNYKIPASGGDALLKYDTHTTSNGRWSNMAPGPPMATAGAGDSDFSNSQLIFAGPNQSGNTTTSSNNLLFTSEEEIATTNPRDTDMFGQIADNNQNATTAPHIANLDAMGIVPGMVWQNRDIYYLGPIWAKVPHTDGHFHPSPLMGGFGLKHPPPQIFIKNTPVPANPNTTFSAARINSFLTQYSTGQVAVQIDWEIQKEHSKRWDPEVQFTSNYGTQNSMLWAPDNAGNYHEPRAIGSRFLTHHL

SEQ ID NO: 16 - protein, 739 aa, Papio hamadryas
MAADGYLPDWLEDNLSEGIREWWALKPGAPQPKANQQHQGNSRGLVLPGYKYLGLFNGLDKGEPVNEADAAALEHDKAYDKQLEQGDDPYLKYNHADAEFQERLQEDTSFGGNLGRAVFQAKKRILEPLGLVEEAAKTAPGKKRPLEKTPNQPTDTQAAGQTPAKKRPQGEQSGDSARRQLDFGPQPAAPIGQPPAAPPPVGSNTMASGGGGPMADDNQGADGVGNASGNWHCDSTWLGDRVITTSTRTWVLPTYNNHIYKQISSESGATNDNHYFGYSTPWGYFDFNRFHCHFSPRDWQRLINNNWGFRPKRLNFKIFNVQVKEVTQIEGGSTIANNLTSTIQVFADSEYQLPYVLGSAHQGCLPPFPADVFMIPQYGYLTLNNGSQSVGRSSFYCLEYFPSQMLRTGNNFQFSYTFESVPFHSSYAHSQSLDRIMNPLVDQYLYYLARTQTGTGSTTSNTRQLQFYQAGPSNMADQSRNWLPGPMYRQQRVSKTLDQNSNTNFAWTAASKYNLNGRKSLANPGIAMATHKDDEERFFPQHGVLVFGQTNATNKTTLDNVLVTSEEEIKATNPVATEEYGTVSSNLQASNTNPTTETVNNQGILPGMVWQDRDVYLQGPIWAKIPHTDGHFHPSPLMGGFGLKHPPPQILIKNTPVPANPPETFTTSKFASYITQYSTGQVSVEIEWELQKENSKRWNPEIQYTSNYAKSNNVEFSVDAAGVYSEPRPIGTRYLTRNL

SEQ ID NO: 17 - protein, 739 aa, Papio hamadryas
VAADGYLPDWLEDNLSEGIREWWALKPGAPQPKANQQHQDNSRGLVLPGYKYLGPFNGLDKGEPVNEADAAALEHDKAYDKQLEQGDNPYLKYNHADAELQERLQEDTSFGGNLGRAVFQAKKRILEPLGLVEEAAKTAPGKKRPLEKTPNQPTDTQAAGQTPAKKRPQGEQSGDSARRQLDFDPQPAAPIGQPPAAPPPVGSNTMASGGGGPMADDNQGADGVGNASGNWHRDSTWLGDRVITTSTRTWVLPTYNNHIYKQISSESGATNDNHYFGYSTPWGYFDFNRFHCHFSPRDWQRLINNNWGFRPKRLNFKIFNIQVKEVTQIEGGSTIANNLTSTIQVFADSEYQLPYVLGSAHQGCLPPFPADVFMIPQYGYLTLNNGSQSVGRSSFYCLEYFPSQMLRTGNNFQFSYTFESVPFHSSYAHSQSLDRIMNPLVDQYLYYLARTQTGTGSTTSNTRQLQFYQAGPSNMADQSRNWLPGPMYRQQRVSKTLDQNSNTNFAWTAASKYNLNGRKSLANPGIAMATHKDDEERFFPQHGVLVFGQTNATNKTTLDNVLITSEEEIKATNPVATEEYGTVSSNLQASNTNPTTETVNSQGILPGMVWQDRDVYLQGPIWAKIPHTDGHFHPSPLMGGFGLKHPPPQILIKNTPVPANPPETFTTSKFASYITQYSTGQVSVEIEWELQKENGKRWNPEIQYTSNYAKSNNVEFSVDAAGVYSEPRPIGTRYLTRNL

SEQ ID NO: 18 - protein, 739 aa, Papio hamadryas
MAADGYLPDWLEDNLSEGIREWWALKPGAPQPKANQQHQDNSRGLVLPGYKYLGPFNGLDKGEPVNEADAAALEHDKAYDKQLEQGDNPYLKYNHADAEFQERLQEDTSFGGNLGRAVFQAKKRILEPLGLVEEAAKTAPGKRRPLEKTPNQPTDTQAAGQTPAKKRPQGEQSGDSARRQLDFDPQPAAPIGQPPAAPSPVGSNTMASGGGGPMADDNQGADGVGNASGNWHCDSTWLGDRVITTSTRTWVLPTYNNHIYKQISSESGATNDNHYFGYSTPWGYFDFNRFHCHFSPRDWQRLINNNWGFRPKRLNFKIFNIQVKEVTQIEGGSTIANNLTSTIQVFADSEYQLPYVLGSAHQGCLPPFPADVFMIPQYGYLTLNNGSQSVGRSSFYCLEYFPSQMLRTGNNFQFSYTFESVPFHSSYAHSQSLDRIMNPLVDQCLYYLARTQTGTGSTTSNTRQLQFYQAGPSNMADQSRNWLPGPMYRQQRVSKTLDQNSNTNFAWTAASKYNLNGRKSLANPGIAMATHKDDEERFFPQHGVLVFGQTNATNKTTLDNVLITSEEEIKATNPVATEEYGTVSSNLQASNTNPTTETVNNQGILPGMVWQDRDVYLQGPIWAKIPHTDGHFHPSPLMGGFGLKHPPPQILIKNTPVPANPPETFTTSKFASYITQYSTGQVSVEIEWELQKEDSKRWNPEIQYTSNYAKSNNVEFSVDAAGVYSEPRPIGTRYLTRNL

SEQ ID NO: 19 - protein, 739 aa, Papio hamadryas
MAADGYLPDWLEDNLSEGIREWWALKPGAPQPKANQQHQDNSRGLVLPGYKYLGPFNGLDKGEPVNEADAAALEHDKAYDKQLEQGDNPYLKYNHADAEFQERLQEDTSFGGNLGRAVFQAKKRILEPLGLVEEAAKTAPGKKRPLEKTPNQPTDTQAAGQTPAKKRPQGGQSGDSARRQLDFDPQPAAPIGQPPAAPSPVGSNTMASGGGGPMADDNQGADGVGNASGNWHCDSTWLGDRVITTSTRTWVLPTYNNHIYKQISSESGATNDNHYFGYSTPWGYFDFNRFHCHFSPRDWQRLINNNWGFRPKRLNFKIFNIQVKEVTQIEGGSTIANNLTSTIQVFADSEYLLPYVLGSAHQGCLPPFPADVFMIPQYGYLTLNNGSQSVGRSSFYCLEYFPSQMLRTGNNFQFSYTFESVPFHSSYAHSQSLDRIMNPLVDQYLYYLARTQTGTGSTTSNTRQLQFYQAGPSNMADQSRNWLPGPMYRQQRVSKTLDQNSNTNFAWTAASKYNLNGRKSLANPGIAMATHKDDEERFFPQHGVLVFGQTNATNKTTLDNVLITSEEEIKATNPVATEEYGTVSSNLQASNTNPTTETVNNQGILPGMVWQDRDVYLQGPIWAKIPHTDGHFHPSPLMGGFGLKHPPPQILIKNTPVPANPPETFTTSKFASYITQYSTGQVSVEIEWELQKEDSKRWNPEIQYTSNYAKSNNVEFSVDAAGVYSEPRPIGTRYLTRNL

SEQ ID NO: 20 - protein, 742 aa, Papio hamadryas
MAADGYLPDWLEDNLSEGIREWWALKPGAPQPKANQQHQDNARGLVLPGYKYLGPGNGLDKGEPVNEADAAALEHDKAYDQQLKSGDNPYLKYNHADAEFQQRLATDTSFGGNLGKAVFQAKKRILEPLGLVEEGVKTAPGKKHPLEKTPNRPTNPDSGKAPAKKKQKDGETADSARRTLDFEDSGAGDGPPEGSSSGEMSHDAEMRAAPGGNAVEAGQGADGVGNASGDWHCGSTWSEGRVTTTSTRTWVLPTYNNHLYLRIGTTANSNTYNGFSTPWGYFDFNRFHCHFSPRDWQRLINNNWGLRPKSMRVKIFNIQVKEVTTSNGETTVANNLTSTVQIFADSTYELPYVMDAGQEGSLPPFPNDVFMVPQYGYCGVVTGENQNQTDRNAFYCLECFPSQMLRTGNNFEISYQFEKVPFHSMYAHSQSLDRMMNPLLDQYLWHLQSTTTGNSLNQGTATTTYGKITTGDFAYYRKNWLPGACIKQQKFSKNASQNYKIPASGGDALLKYDTHTTLNGRWSNMAPGPPMATAGAGDSDFSNSQLIFAGPNQSGNTTTSSNNLLFTSEEEIAATNPRDTDMFGQIADNNQNATTAPHIANLDAMGIVPGMVWQNRDIYYQGPIWAKVPHTDGHFHPSPLMGGFGLKHPPPQIFIKNTPVPANPNTTFSAARINSFLTQYSTGQVAVQIDWEIQKEHSKRWNPEVQFTSNYGTQNSMLWAPDNAGNYHEPRAIGSRFLTHHL

SEQ ID NO: 21 - protein, 742 aa, Papio hamadryas
MAADGYLPDWLEDNLSEGIREWWALKPGAPQPKANQQHQDNARGLVLPGYKYLGPGNGLDKGEPVNEADAAALEHDKAYDQQLKSGDNPYLKYNHADAEFQQRLATDTSFGGNLGKAVFQAKKRILEPLGLVEEGVKTAPGKKRPLEKTPNRPTNPDSGKAPAKKKQKDGETADSARRTLDFEDSGAGDGPPEGSSSGEMSHDAEMRAAPGGNAVEAGQGADGVGNASGGWHCDSTWSEGRVTTTSTRTWVLPTYNNHLYLRIGTTANSNTYNGFSTPWGYFDFNRFHCHFSPRDWQRLINNNWGLRPKSMRVKIFNIQVKEVTTSNGETTVANNLTSTVQIFADSTYELPYVMDAGQEGSLPPFPNDVFMVPQYGYCGVVTGENQNQTDRNAFYCLEYFPSQMLRTGNNFEISYQFEKVPFHSMYAHSQSLDRMMNPLLDQYLWHLQSTTTGNSLNQGTATTTYGKITTGDFAYYRKNWLPGACIKQQKFSKNASQNYKIPASGGDALLKYDTHTTLNGRWSSMAPGPPMATAGAGDSDFSNSQLIFAGPNQSGNTTTSSNNLLFTSEEEIATTNPRDTDMFGQIADNNQNATTAPHIANLDAMGIVPGMVWQNRDIYYQGPIWAKVPHTDGHFHPSPLMGGFGLKHPPPQIFIKNTPVPANPNTTFSAARINSFLTQYSTGQVAVQIDWEIQKEHSKRWNPEVQFTSNYGTQNSMLWAPGNAGNHHEPRAIGSRFLTHHL

SEQ ID NO: 22 - protein, 742 aa, Papio hamadryas
MAADGYLPDWLEDNLSEGIREWWALKPGAPQPKANQQHQDNARGLVLPGYKYLGPGNGLDKGEPVNEADAAALEHDKAYDQQLKSGDNPYLKYNHADAEFQQRLATDTSFGGNLGKAVFQAKKRILEPLGLVEEGVKTAPGKKRPLEKTPNRPTNPDSGRAPAKKKQKDGETADSARRTLDFEDSGAGDGPPEGSSSGEMSHDAEMRAAPGGNAVEAGQGADGVGNASGDWHCDSTWSEGRVTTTSTRTWVLPTYNNHLYLRIGTTANSNTYNGFSTPWGYFDFNRFHCHFSPRDWQRLINNNWGLRPKSMRVKIFNIQVKEVTTSNGETTVANNLTSTVQIFADSTYELPYVMDAGQEGSLPPFPNDVFMVPQYGYCGVVTGENQNQTDRNAFYCLEYFPSQMLRTGNNFEISYQFEKVPFHSMYAHSQSLDRMMNPLLDQYLWHLQSTTTGNSLNQGTATTTYGKITTGDFAYYRKNWLPGACIKQQKFSKNASQNYKIPASGGDALLKYDTHTTLNGRWSNMAPGPPMATAGAGDSDFSNSQLIFAGPNQSGNTTTSSNNLLLTSEEEIATTNPRDTDMFGQIADNNQNATTAPHIANLDAMGIVPGMVWQNRDIYYQGPIWAKVPHTDGHFHPSPLMGGFGLKHPPPQIFIKNTPVPANPNTTFSAARINSFLTQYSTGQVAVQIDWEIQKEHSKRWNPEVQFTSNYGTQNSMLWAPGNAGNYHEPRAIGSRFLTHHL

SEQ ID NO: 23 - protein, 739 aa, Papio hamadryas
MAADGYLPDWLEDNLSEGIREWWALKPGAPQPKANQQHQDNSRGLVLPGYKYLGPFNGLDKGEPVNEADAAALEHDKAYDKQLEQGDNPYLKYNHADAEFQERLQEDTSFGGILGRAVFQAKKRILEPLGLVEEAAKTAPGKKRPLEKTPNQPTDTQAAGQTPAKKRPQGEQSGDSARRQLDFDPQPAAPIGQPPAAPSPVGSNTMASGGGGPMADDNQGADGVGNASGNWHCDSTWLGDRVITTSTRTWVLPTYNNHIYKQISSESGATNDNHYFGYSTPWGYFDFNRFHCHFSPRDWQRLINNNWGFRPKRLNFKIFNIQVKEVTQIEGGSTIANNLTSTIQVFADSEYQLPYVLGSAHQGCLPPFPADVFMIPQYGYLTLNNGSQSVGRSSFYCLEYFPSQMLRTGNNFQFSYTFESVPFHSSYAHSQSLDRIMNPLVDQYLYYLARTQTGTGSTTSNTRQLQFYQAGPSNMADQSRNWLPGPMYRQQRVSKTLDQNSNTNFAWTAASKYNLNGRKSLVNPGIAMATHKDDEERFFPQHGVLVFGKTNATNKTTLENVLVTDEEEVKATNPVATEEYGTVSSNLQSNTTNPTTETVNNQGILPGMVWQDRDVYLQGPIWAKIPHTDGHFHPSPLMGGFGLKHPPPQILIKNTPVPANPPETFTTSKFASYITQYSTGQVSVEIEWELQKENSKRWNPEIQYTSNYAKSNNVEFSADAAGVYSEPRPIGTRYLTRNL

SEQ ID NO: 24 - protein, 739 aa, Papio hamadryas
MAADGYLPDWLEDNLSEGIREWWALKPGAPQPKANQQHQDNSRGLVLPGYKYLGPFNGLDKGEPVNEADAAALEHDKAYDKQLEQGDNPYLKYNHADAEFQERLQEDTSFGGNLGRAVFQAKKRILEPLGLVEEVAKTAPGKKRPLEKTPNQPTDTQAAGQTPAKKRPQGEQSGDSARRQLDFDPQPAAPIGQPPAAPSPVGSNTMASGGGGPMADDNQGADGVGNASGNWHCDSTWLGDRVITTSTRTWVLPTYNNHIYKQISSESGATNDNHYFGYSTPWGYFDFNRFHCHFSPRDWQRLINNNWGFRPKRLNFKIFNIQVKEVTQIEGGSTIANNLTSTIQVFADSEYQLPYVLGSAHQGCLPPFPADVFMIPQYGYLTLNNGSQSVGRSSFYCLEYFPSQMLRTGNNFQFSYTFESVPFHSSYAHSQSLDRIMNPLVDQYLYYLARTQTGTGSTTSNTRQLQFYQAGPSNMADQSRNWLPGPMYRQQRVSKTLDQNSNTNFAWTAASKYNLNGRKSLANPGIAMATHKDDEERFFPQHRVLVFGQTNATNKTTLDNVLITSEEEIKATNPVATEEYGTVSSNLQASNTDPTTETVNNQGILPGMVWQDRDVYLQGPIWVKIPHTDGHFHPSPLMGGFGLKHPPPQILIKNTPVPANPPETFTTSKFASYTTQYSTGQVSVEIEWGLQKENSKRWNPEIQYTSNYAKSNNVEFSVDAAGVYSEPRPIGTRYLTRNL

SEQ ID NO: 25 - protein, 739 aa, Papio hamadryas
MAADGYLPDWLEDNLSEGIREWWALKPGAPQPKANQQHQDNSRGLVLPGYKYLGPFNGLDKGEPVNEAYAAALEHDKAYDKQLEQGDNPYLKYNHADAEFQERLQEDTSFGGNLGRAVFQAKKRIPEPLGLVEEAAKTAPGKKRPLEKTPNQPTDTQAAGQTPAKKRPQGEQSGDSARRQLDFDPQPAAPIGQPPAAPSPVGSNTMASGGGGPMADDNQGADGVGNASGNWHCDSTWLGDRVITTSTRTWVLPTYNNHIYKQISSESGATNDNHYFGYSTPWGYFDFNRFHCHFSPRDWQRLINNNWGFRPKRLNFKIFNIQVKEVTQIEGGSTIANNLTSTIQVFADSEYQLPYVLGSAHQGCLPPFPADVFMIPQYGYLTLNNGSQSVGRPSFYCLEYFPSQMLRTGNNFQFSYTFESVPFHSSYAHSQSLDRIMNPLVDQYLYYLARTQTGTGSTTSNTRQLQFYQAGPSNMADQSRNWLPGPMYRQQRVSKTLDQNSNTNFAWTAASKYNLNGRKSLANPGIAMATHKDDEERFFPQHGVLVFGQTNATNKTTLDNVLITSEEEIKATNPVATEEYGTVSSNLQASNTNPTTETVNNQGILPGMVWQDRDVYLQGPIWAKIPHTDGHFHPSPLMGGFGLKHPPPQILIKNTPVPANPPETFTTSKFASYITQYSTGQVSVEIEWELQKENSKRWNPEIQYTSNYAKSNNVEFSVDAAGVYSEPRPIGTRYLTRNL

SEQ ID NO: 26 - protein, 739 aa, Papio hamadryas
MAADGYLPDWLEDNLSEGIREWWALKPGAPQPKANQQHQDNSRGLVLPGYKYLGPFNGLDKGEPVNEADAAALEHDKAYDKQLEQGDNPYLKYNHADAEFQERLQEDTSFGGNLGRAVFQAKKRILEPLGLVEEAAETAPGKKRPLEKTPNQPTDTQAAGQTPAKKRPQGEQSGDSARRQLDFDPQPAAPIGQPPAAPSPVGSNTMASGGGGPMADDNQGADGVGNASGNWHCDSTWLGDRVITTSTRTWVLPTYNNHIYKQISSESGATNDNHYFGYSTPWGYFDFNRFHCHFSPRDWQRLINNNWGFRPKRLNFKIFNIQVKEVTQTEGGSTIANNLTSTIQVFADSEYQLPYVLGSAHQGCLPPFPADVFMIPQYGYLTLNNGSQSVGRSSFYCLEYFPSQMLRTGNNFQFSYTFESVPFHSSYAHSQSLDRIINPLVDQYLYYLARTQTGTGSTTSNTRQLQFYQAGPSNMADQSRNWLPGPMYRQQRVSKTLDQNSNTNFAWTAASKYNLNGRKSLANPGIAMATHKDDEERFFPQHGVLVFGQTNATNKTTLDNVLITSEEEIKATNPVATEEYGTVSSNLQASNTNPTTETVNNQGILPGMVWQDRDVYLQGPIWAKIPHTDGHFHPSPLMGGFGLKHPPPQILIKNTPVPANPPETFTTSKFASYITQYSTGQVSVEIEWELQKENSKRWNPEIQYTSNYAKSNNVEFSVDAAGVYSEPRPIGTRYLTRNL

SEQ ID NO: 27 - protein, 739 aa, Papio hamadryas
MAADGYLPDWLEDNLSEGIRGWWALKPGAPQPKANQQHQDNSRGLVLPGYKYLGPFNGLDKGEPVNEADAAALEHDKAYDKQLEQGDNPCLKYNHADAEFQERLQEDTSFGGNLGRAVFQAKKRILEPLGLVEEAAKTAPGKKRPLEKTPNQPTDTQAAGQTPAKKRPQGEQSGDSARRQLDFDPQPAAPIGQPPAAPSPVGSNTMASGGGGPMADDNQGADGVGNASGNWHCDSTWLGDRVITTSTRTWVLPTYNNHIYKQISSESGATNDNHYFGYSTPWGYFDFNRFHCHFSPRDWQRLINNNWGFRPKRLNFKIFNIQVKEVTQIEGGSTIANNLTSTIQVFADSEYQLPYVLGSAHQGCLPPFPADVFMIPQYGYLTLNNGSQSVGRSSFYCLEYFPSQMLRTGNNFQFSYTFESVPFHSSYAHSQSLDRIMNPLVDQYLYYLARTQTGTGSTTSNTRQLQFYQAGPSNMADQSRNWLPGPMYRQQRVSKTLDQNSNTNFAWTAASKYNLNGRKSLANPGIAMATHKDDEERFFPQHGVLVFGQTNATNKTTLDNVLITSEEEIKATNPVATEEYGTVSSNLQASNTNPTTETVNNQGILPGMVWQDRDVYLQGPTWAKIPHTDGHFHPSPLMGGFGLKHPPPQILIKNTPVPANPPETFTTSKFASYITQYSTGQVSVEIEWELQKENSKRWNPEIQYTSNYAKSNNVEFSVDAAGVYSEPRPIGTRYLTRNL

SEQ ID NO: 28 - protein, 739 aa, Papio hamadryas
MAADGYLPDWLEDNLSEGIREWWALKPGAPQPKANQQHQDNSRGLVLPGYKYLGPFNGLDKGEPVNEADAAALEHDKAYDKQLEQGDNPYLKYNHADAEFQERLQEDTSFGGNLGRAVFQAKKRILEPLGLVEEAAKTAPGKKRPLEKTPNQPTDTQAAGQTPAKKRPQGEQSGDSARRQLDFDPQPAAPIGQPPAAPSPVGSNTMASGGGGPMADDNQGADGVGNASGNWHCDSTWLGDRVITTSTRTWVLPTYNNHIYKQISSESGATNDNHYFGYSTPWGYFDFNRFHCHFSPRDWQRLINNNWGFRPKRLNFKIFNIQVKEVTQIEGGSTIANNLTSTIQVFADSEYQLPYVLGSAHQGCLPPFPADVFMIPQYGYLTLNNGSQSVGRSSFYCLEYFPSQMLRTGNSFQFSYTFESVPFHSSYAHSQSLDRIMNPLVDQYLYYLARTQTGTGSTTSNTRQLQFYQAGPSNMADQSRNWLPGPMYRQQRVSKTLDQNSNTNFAWTAASKYNLNGRKSLANPGIAMATHKDDEERFFPQHGVLVFGQTNATNKTTLDNVLITSEEEIKATNPVATEEYGTVSSNLQASNTNPTTETVNNQGILPGMVWQDRDVYLQGPIWAKIPHTDGHFHPSPLMGGFGLKHPPPQILIKNTPVPANPPETFTTSKFASYITQYSTGQVSVEIEWELQKENSKRWNPEIQYTSNYAKSNNVEFSVDAAGVYSEPRPIGTRYLTRNL

SEQ ID NO: 29 - protein, 739 aa, Papio hamadryas
MAADGYLPDWLEDNLSEGIREWWALKPGAPQPKANQQHQDNSRGLVLPGYKYLGPFNGLDKGEPVNGADAAALEHDKAYDKQLEQGDNPYLKYNHADAEFQERLQEDTSFGGNLGRAVFQAKKRILEPLGLVEEAAKTAPGKKRPLEKTPNQPTDTQAAGQTPAKKRPQGEQSGDSARRQLDFDPQPAAPIGQPPAAPSPVGSNTMASGGGGPMADDNQGADGVGNASGNWHCDSTWLGDRVITTSTRTWVLPTYNNHIYKQISSESGATNDNHYFGYSTPWGYFDFNRFHCHFSPRDWQRLINNNWGFRPKRLNFKIFNIQVKEVTQIEGGSTIANNLTSTIQVFADSEYQLPYVLGSAHQGCLPPFPADVFMIPQYGYLTLNNGSQSVGRSSFYCLEYFPSQMLRTGNNFQFSYTFESVPFHSSYAHSQSLDRIMNPLVDQYLYYLARTQTGTGSTTSNTRQLQFYQAGPSNMADQSRNWLPGPMYRQQRVSKTLDQNSNTNFAWTAASKYNLNGRKSLVNPGIAMATHKDDEERFFPQHGVLVFGKTNATNKTTLENVLVTDEEEVKATNPVATEEYGTVSSNLQSNTTNPTTETVNNQGILPGMVWQDRDVYLQGPIWAKIPHTDGHFHPSPLMGGFGLKHPPPQILIKNTPVPANPPETFTTSKFASYITQYSTGQVSVEIEWELQKENSKRWNPEIQYTSNYAKSNNVEFSVDAAGVYSEPRLIGTRYLTRNL

SEQ ID NO: 30 - protein, 739 aa, Papio hamadryas
MAADGYLPDWLEDNLSEGIREWWALKPGAPQPKANQQHQDNSRGLVLPGYKYLGPFNGLDKGEPVNEADAAALEHDKAYDKQLEQGDNPYLKYNHADAEFQERLQEDTSFGGNLGRAVFQAKKRILEPLGLVEEAAKTAPGKKRPLEKTPNQPTDTQAAGQTPAKKRPQGEQSGDSARRQLDFDPQPAAPIGQPPAAPSPVGSNTMASGGGGPMADDNQGADGVGNASGNWHCDSTWLGDRVITTSTRTWVLPTYNNHIYKQISSESGATNDNHYFGYSTPWGYFDFNRFHCHFSPRDWQRLINNNWGFRPKRLNFKIFNIQVKEVTQIEGGSTIANNLTSTIQVFADSEYQLPYVLGSAHQGCLPPFPADVFMIPQYGYLTLNNGSQSVGRSSFYCLEYFPSQMLRTGNNFQFSYTFESVPFHSSYAHSQSLDRIMNPLVDQYLYYLARTQTGTGSTTSNTRQLQFYQAGPSNMADQSRNWLPGPMYRQQRVSKTLDQNSNTNFAWTAASKYNLNGRKSLVNPGIAMATHKDDEERFFPQHGVLVFGKTNATNKTTLENVLVTDEEEVKATNPVATEEYGTVSSNLQSNTTNPTTETVNNQGILPGMVWQDRDVYLQGPIWAKIPHTDGHFHPSPLMGGFGLKHPPPQILIKNTPVPANPPETFTTSKFASYITQYSTGQVSVEIEWELQKENSKRWNPEIQYTSNYAKSNNVEFSVDAAGVYSEPRPIGTRYLTRNL

SEQ ID NO: 31 - protein, 739 aa, Papio hamadryas
MAADGYLPDWLEDNLSEGIREWWALKPGAPQPKANQQHQDNSRGLVLPGYKYLGPFNGLDKGEPVNEADAAALEHDKAYDKQLEQGDNPYLKYNHADAEFQERLQEDTSFGGNLGRAVFQAKKRILEPLGLVEEAAKTAPGKKRPLEKTPNQPTDTQAAGQTPAKKRPQGEQSGDSARRQLDFDPQPAAPIGQPPAAPSPVGSNTMASGGGGPMADDNQGADGVGNASGNWHCDSTWLGDRVITTSTRTWVLPTYNNHIYKQISSESGATNDNHYFGYSTPWGYFDFNRFHCHFSPRDWQRLINNNWGFRPKRLNFKIFNIQVKEVTQIEGGSTIANNLTSTIQVFADSEYQLPYVLGSAHQGCLPPFPADVFMIPQYGYLTLNNGSQSVGRSSFYCLEYFPSQMLRTGNNFQFSYTFESVPFHSSYAHSQSLDRIMNPLVDQYLYYLARTQTGTGSTTSNTRQLQFYQAGPSNMADQSRNWLPGPMYRQQRVSKTLDQDSNTNFAWTAASKYNLNGRKSLVNPGIAMATHKDDEERFFPQHGVLVFGKTNATNKTTLENVLVTDEEEVKATNPVATEEYGTVSSNLQSNTTNPTTETVNNQGILPGMAWQDRDVYLQGPIWAKIPHTDGHFHPSPLMGGFGLKHPPPQILIKNTPVPANPPETFTTSKFASYITQYSTGQVSVEIEWELQKENSKRWNPEIQYTSNYAKSNNVEFSVDAAGVYSEPRPIGTRYLTRNL

SEQ ID NO: 32 - protein, 736 aa, Macaca fascicularis
MAADGYLPDWLEDNLSEGIREWWALKPGAPQPKANQQKQDDGRGLVLPGYKYLGPFNGLDKGEPVNEADAAALEHDKAYDQQLKAGDNPYLRYNHADAEFQERLQEDTSFGGNLGRAVFQAKKRVLEPLGLVEEAAKTAPGKKRPVEQSPQEPDSSAGIGKSGAQPAKKRLNFGQTGDTESVPDPQPIGEPPAAPSGVGSLTMASGGGAPVADNNEGADGVGSSSGNWHCDSQWLGDRVITTSTRTWALPTYNNHLYKQISNSTSGGSSNDNAYFGYSTPWGYFDFNRFHCHFSPRDWQRLINNNWGFRPKRLNFKLFNIQVKEVTDNNGVKTIANNLTSTVQVFTDSDYQLPYVLGSAHEGCLPPFPADVFMIPQYGYLTLNDGSQAVGRSSFYCLEYFPSQMLRTGNNFTFSYEFENVPFHSSYAHSQSLDRLMNPLIDQYLYYLSKTINGSGQNQQALKFSVAGPSNMAVQGRNYIPGPSYRQQRVSTTVTQNNNSEFAWPGASSWALNGRNSLMNPGPAMASHKEGEDRFFPLSGSLIFGKQGTGRDNVDADKVMITNEEEIKTTNPVATESYGQVATNHQSAQAQAQTGWVQNQGILPGMVWQDRDVYLQGPIWAKIPHTDGNFHPSPLVGGFGMKHPPPQILIKNTPVPADPPTAFNKDKLNSFITQYSTGQVRVEIEWELQKENSKRWNPEIQYTSNYYKSNNVEFAVNTEGVYSEPRPIGTRYLTRNL

SEQ ID NO: 33 - protein, 736 aa, Macaca fascicularis
MAADGYLPDWLEDNLSEGIREWWALKPGAPQPKANQQKQDDGRGLVLPGYKYLGPFNGLDKGEPVNEADAAALEHDKAYDQQLKAGDNPYLRYNHADAEFQERLQEDTSFGGNLGRAVFQAKKRVLEPLGLVEEAAKTAPGKKRPVEQSPQEPDSSAGIGKSGAQPAKKRLNFGQTGDTESVPDPQPIGEPPAAPSGVGSLTMASGGGAPVADNNEGADGVGSSSGNWHCDSQWLGDRVITTSTRTWALPTYNNHLYKQISNSTSGGSSNDNAYFGYSTPWGYFDFNRFHCHFSPRDWQRLINNNWGFRPKRLNFKLFNIQVKEVTDNNGVKTIANNLTSTVQVFTDSDYQLPYVLGSAHEGCLPPFPADVFMIPQYGYLTLNDGSQAVGRSSFYCLEYFPSQMPRTGNNFTFSYEFENVPFHSSYAHSQSLDRLMNPLIDQYLYYLSKTINGSGQNQQTLKFSVAGPSNMAVQGRNYIPGPSYRQQRVSTTVTQNNNSEFAWPGASSWALNGRNSLMNPGPAMASHKEGEDRFFPLSGSLIFGKQGTGRDNVDADKVMITNEEEIKTTNPVATESYGQVATNHQSAQAQAQTGWVQNQGILPGMVWQDRDVYLQGPIWAKIPHTDGNFHPSPLMGGFGMKHPPPQILIKNTPVPADPPTAFNKDKLNSFITQYSTGQVSVAIEWELQKENSKRWNPEIQYTSNYYKSNNVEFAVNTEGVYSEPRPIGTRYLTRNL

SEQ ID NO: 34 - protein, 736 aa, Macaca fascicularis
MAADGYLPDWLEDNLSEGIREWWALKPGAPQPKANQQKQDDGRGLVLPGYKYLGPFNGLDKGEPVNEADAAALEHDKAYDQQLKAGDNPYLRYNHADAEFQERLQEDTSFGGNLGRAVFQAKKRVLEPLGLVEEAAKTAPGKKRPVEQSPQEPDSSAGIGKSGAQPAKKRLNFGQTGDTESVPDPQPIGEPPAAPSGVGSLTMASGGGAPVADNNEGADGVGSSSGNWHCDSQWLGDRVITTSTRTWALPTYNNHLYKQISNSTSGGSSNDNAYFGYSTPWGYFDFNRFHCHFSPRDWQRLINNNWGFRPKRLNFKLFNIQVKEVTDNNGVKTIANNLTSTVQVFTDSDYQLPYVLGSAHEGCLPPFPADVFMIPQYGYLTLNDGSQAVGRSSFYCLEYFPSQMLRTGNNFTFSYEFENVPFHSSYAHSQSLDRPMNPLIDQYLYYLSKTINGSGQNQQTLKFSVAGPSNMAVQGRNYIPGPSYRQQRVSTTVTQNNNSEFAWPGASSWALNGRNSLMNPGPAMASHKEGEDRFFPLSGSLIFGKQGTGRDNVDADKVMITNEEEIKTTNPVATESYGQVATNHQSAQAQAQTGWVQNQGILPGMVWQDRDVYLQGPIWAKIPHTDGNFHPSPLMGGFGMKHPPPQILIKNTPVPADPPTAFNKDKLNSFITQYSTGQVSVEIEWELQKENSKRWNPEIQYTSNYYKSNNVEFAVNTEGVYSEPRPIGTRYLTRNL

SEQ ID NO: 35 - protein, 736 aa, Macaca fascicularis
MAADGYLPDWLEDNLSEGIREWWALKPGAPQPKANQQKQDDGRGLVLPGYKYLGPFNGLDKGEPVNEADAAALEHDKAYDQQLKAGDNPYLRYNHADAEFQERLQEDTSFGGNLGRAVFQAKKRVLEPLGLVEEAAKTAPGKKRPVEQSPQEPDSSAGIGKSGAQPAIKRLNFGQTGDTESVPDPQPIGEPPAAPSGVGSLTMASGGGAPVADNNEGADGVGSSSGNWHCDSQWLGDRVITTSIRTWALPTYNNHLYKQISNSTSGGSSNDNAYFGYSTPWGYFDFSRFHCHFSPRDWQRLINNNWGFRPKRLNFKLFNIQVKEVTDNNGVKTIANNLTSTVQVFTDSDYQLPYVLGSAHEGCLPPFPADVFMIPQYGYLTLNDGSQAVGRSSFYCLEYFPSQMLRTGNNFTFSYEFENVPFHSSYAHSQSLDRLMNPLIDQYLYYLSKTINGSGQNQQTLKFSVAGPSNMAVQGRNYIPGPSYRQQRVSTTVTQNNNSEFAWPGASSWALNGRNSLMNPGPAMASHKEGEDRFFPLSGSLIFGKQGTGRDNVDADKVMITNEEEIKTTNPVATESYGQVATNHQSAQAQAQTGWVQNQGILPGMVWQDRDVYLQGPIWAKIPHTDGNFHPSPLMGGFGMKHPPPQILIKNTPVPADPPTAFNKDKLNSFITQYSTGQVSVEIEWELQKENSKRWNPEIQYTSNYYKSNNVEFAVNTEGVYSEPRPIGTRYLTRNL

SEQ ID NO: 36 - protein, 736 aa, Macaca fascicularis
MAADGYLPDWLEDNLSEGIREWWALKPGAPQPKANQQKQDDGRGLVLPGYKYLGPFNGLDKGEPVNEADAAALEHDKAYDQQLKAGDNPYLRYNHADAEFQERLQEDTSFGGNLGRAVFQAKKRVLEPLGLVEEAAKTAPGKKRPVEQSPQEPDSSAGIGKSGAQPAKKRLNFGQTGDTESVPDPQPIGEPPAAPSGVGSLTMASGGGAPVADNNEGADGVGSSSGNWHCDSQWLGDRVITTSTRTWALPTYNNHLYKQISNSTSGGSSNDNAYFGYSTPWGYFDFNRFHCHFSPRDWQRLINNNWGFRPKRLNFKLFNIQVKEVTDNNGVKTIANNLTSTVQVFTDSDYQLPYVLGSAHEGCLPPFPADVFMIPQYGYLTLNDGSQAVGRSSFYCLEYFPSQMLRTGNNFTFSYEFENVPFHSSYAHSQSLDRLMNPLIDQYLYYLSKTINGSGQNQQTLKFSVAGPSNMAVQGRNYIPGPSYRQQRVSTTVTQNNNSEFAWPGASSWALNGRNSLMNPGPAMASHKEGEDRFFPLSGSLIFGKQGTGRDNVDADKVMITNEEEIKTTNPVATESYGQVATNHQSAQAQAQTGWVQNQGILPGMVWQDRDVYLQGPIWAKIPHTDGNFHPSPLMGGFGMKHPPPQILIKNTPVPADPPTAFNKDKLNSFITQYSTGQVSVEIEWELQKENSKRWNPEIQYTSNYYKSNNVEFAVNTEGVYSEPRPIGTRYLTRNL

SEQ ID NO: 37 - protein, 733 aa, Macaca fascicularis
MAADGYLPDWLEDNLSEGIREWWALKPGAPQPKANQQKQDDGRGLVLPGYKYLGPFNGLDKGEPVNEADAAALEHDKAYDQQLKAGDNPYLRYNHADAEFQERLQEDTSFGGNLGRAVFQAKKRVLEPLGLVEEAAKTAPGKKRPVEQSPQEPDSSAGIGKSGAQPAKKRLNFGQTGDTESVPDPQPIGEPPAAPSGVGSLTMASGGGAPVADNNEGADGVGSSSGNWHCDSRWLGDRVITTSTRTWALPTYNNHLYKQISNSTSGGSSNDNAYFGYSTPWGYFDFNRFHCHFSPRDWQRLINNNWGFRPKRLNFKLFNIQVKEVTDNNGAKTIANNLTSTVQVFTDSDYQLPYVLGSAHEGCLPPFPADVFMIPQYGYLTLNDGSQAVGRSSFYCLEYFPSQMLRTGNNFTFSYEFENVPFHSSYAHSQSLDRLMNPLIDQYLYYLSKTINGSGQNQQTLKFSVAGPSNMAVQGRNYIPGPSYRQQRVSTTVTQNNNSEFAWPGASSWALNGRNSLMNPGPAMASHKEGEDRFFPLSGSLIFGKQGTGRDNVDADKVMITNEEEIKTTNPVATESYGQVATNHQSAQAQAQTGWVQNQGILPGMVWQDRDVYLQGPIWAKIPHTDGNFHPSPLMGGFGMKHPPPQILIKNTPVPADPPTAFNKDKLNSFITQYSTGQVSVEIEWELQKENSKRWNPEIQYTSNYYKSNNVEFAVNTEGVYSEPRPIGTRYLT

SEQ ID NO: 38 - protein, 730 aa, Macaca fascicularis
MAADGYLPDWLEDNLSEGIREWWALKPGAPQPKANQQKQDDGRGLVLPGYKYLGPFNGLDKGEPVNEADAAALEHDKAYDQQLKAGDNPYLRYNHADAEFQERLQEDTSFGGNLGRAVLQAKKRVLEPLGLVEEAAKTAPGKKRPVDSPDSTSGIGKKGQQPARKRLNFGQTGDAESVPDPQPIGEPPAAPSGLGSGTMAAGGGAPMADNNEGADGVGNASGNWHCDSTWLGNRVITTSTRTWALPTYNNHLYKQISSSSSGATNDNHYFGYSTPWGYFDFNRFHCHFSPRDWQRLINNNWGFRPKRLRFKLFNIQVKEVTTNDGVTTIANNLTSTVQVFSDSEYQLPYVLGSAHQGCLPPFPADVFMIPQYGYLTLNNGSQSVGRSSFYCLEYFPSQMLRTGNNFEFSYEFEDVPFHSSYAHSQSLDRLMNPLIDQYLYYLARTQSSTGTSTRELQFHQAGPATMAEQSKNWLPGPCFRQQRISKTTDNNNNSNFAWTGATKYHLNGRSSLTNPGVPMATHKDDESVFFPINGVLVFGKTGASNKTTLENVLMTDEEEIKATNPVATEEYGVVSSNIQSQNSNPTTQTVNNQGALPGMVWQNRDVYLQGPIWAKIPHTDGNFHPSPLMGGFGLKHPPPQILIKNTPVPANPPETFTPAKFASFITQYSTGQVSVEIEWELQKENSKRWNPEIQYTSNYDKQTGVGFAVDTQGVYSEPRPIGTRYLTRNL

SEQ ID NO: 39 - protein, 730 aa, Macaca fascicularis
MAADGYLPDWLEDNLSEGIREWWALKPGAPQPKANQQKQDDGRGLVLPGYKYLGPFNGLDKGEPVNEADAAALEHDKAYDQQLKAGDNPYLRYNHADAEFQERLQEDTSFGGNLGRAVFQAKKRVLEPLGLVEEAAKTAPGKKRPVDSPDSTSGIGKKGQQPARKRLNFGQTGDAESVPDPQPIGEPPAAPSGLGSGTMAAGGGAPMADNNEGADGVGNASGNWHCDSTWLGNRVITTSTRTWALPTYNNHLYKQISSSSSGATNDNHYFGYSTPWGYFDFNRFHCHFSPRDWQRLINNNWGFRPKRLRFKLFNIQVKEVTTNDGVTTIANNLTSTVQVFSDSEYQLPYVLGSAHQGCLPPFPADVFMIPQYGYLTLNNGSQSVGRSSFYCLEYFPSQMLRTGNNFEFSYEFEDVPFHSSYAHSQSLDRLMNPLIDQYLYYLARTQSSTGTSTRELQFHQAGPATMAEQSKNWLPGPCFRQQRISKTTDNNNNSNFAWTGATKYHLNGRNSLTNPGVPMATHKDDESVFFPINGVLVFGKTGASNKTTLENVLMTDEEEIKATNPVATEEYGVVSSNIQSQNSNPTTQTVNNQGALPGMVWQNRDVYLQGPIWAKIPHTDGNFHPSPLMGGFGLKHPPPQILIKNTPVPANPPETFTPAKFASFITQYSTGQVSVEIEWELQKENSKRWNPEIQYTSNYDKQTGVDFAVDTQGVYSEPRPIGTRYLTRNL

SEQ ID NO: 40 - protein, 736 aa, Macaca fascicularis
MAADGYLPDWLEDNLSEGIREWWDLKPGAPKPKANQQKQDDGRGLVLPGYKYPGPFNGLDKGEPVNAADAAALEHDKAYDQQLKAGDNPYLRYNHADAEFQERLQEDTSFGGNLGRAVFQAKKRVFEPLGLVEEGAKTAPGKKRPVEQSPQEPDSSSGIGKTGQQPAKKRLNFGQTGDSESVPDPQPLGEPPAAPSGLGPNTMASGGGAPMADNNEGADGVGNSSGNWHCDSTWLGDRVITTSTRTWALPTYNNHLYKQISNSTSGGSTNDNTYFGYSTPWGYFDFNRFHCHFSPRDWQRLINNNWGFRPKRLNFKLFNIQVKEVTTNEGTKTIANNLTSTVQVFTDSEYQLPYVLGSAHQGCLPPFPADVFMVPQYGYLTLNNGSQALGRSSFYCLEYFPSQMLRTGNNFQFSYTFEDVPFHSSYAHSQSLDRLMNPLIDQYLYYLVRTQTTGTGGTQTLAFSQAGPSSMANQARNWVPGPSYRQQRVSTTKNQNNNSNFAWTGAAKFKLNGRNSLMNPGVAMASHKDDEDRFFPSSGVLIFGKQGAGNDGVDYSQVLITDEEEIKATNPVATEEYGEVAINDQAANTQAQTGLVHNQGVIPGMVWQNRDVYLQGPIWAKIPHTDGNFHPSPLMGGFGLMHPPPQILIKNTPVPADPPLTFNQAKLNSFITQYSTGQVSVEIEWELQKENSKRWNPEIQYTSNYYKSTNVDFAVNSDGVYSEPRPIGTRYLTRNL

SEQ ID NO: 41 - protein, 736 aa, Macaca fascicularis
MAADGYLPDWLEDNLSEGIREWWDLKPGAPKPKANQQKQDDGRGLVLPGYKYLGPFNGLDKGEPVNAADAAALEHDKAYDQQLKAGDNPYLRYNHADAEFQGRLQEDTSFGGNLGRAVFQAKKRVLEPLGLVEEGAKTAPGKKRPVEQSPQEPDSSSGIGKTGQQPAKKRLNFGQTGDSESVPDPQPLGEPPAAPSGLGPNTMASGGGAPMADNNEGADGVGNSSGNWHCDSTWLGDRVITTSTRTWALPTYNNHLYKQISNSTSGGSTNDNTYFGYSTPWGYFDFNRFHCHFSPRDWQRLINNNWGFRPKRPNFKLFNIQVKEVTTNEGTKTIANNLTSTVQAFTDSEYQLPYVLGSAHQGCLPPFPADVFMVPQYGYLTLNNGSQALGRSSFYCLEYFPSQMLRTGNNFQFSYTFEDVPFHSSYAHSQSLDRLMNPLIDQYLYYLVRTQTTGTGGTQTLAFSQAGPSSMANQARNWVPGPSYRQQRVSTTKNQNNNSNFAWTGAAKFKLNGRNSLMNPGVAMASHKDDEDRFSPSSGVLIFGKQGAGNDGVDYSQVLITDEEEIKATNPVATEEYGEVAINDQAANTQAQTGLVHNQGVIPGMVWQNRDVYLQGPIWAKIPHTDGNFHPSPLMGGFGLKHPPPQILIKNTPVPADPPLTFNQAKLNSFITQYSTGQVSVEIEWELQKENSKRWNPEIQYTSNYYKSTNVDFAVNSDGVYSEPRPIGTRYLTRNL

SEQ ID NO: 42 - protein, 736 aa, Macaca fascicularis
MAADGYLPDWLEDNLSEGIREWWDLKPGAPKPKANQQKQDDGRGLVLPGYKYLGPFNGLDKGEPVNAADAAALEHDKAYDQQLKAGDNPYLRYNHADAEFQGRLQEDTSFGGNLGRAVFQAKKRVLEPLGLVEEGAKTAPGKKRPVEQSPQEPDSSSGIGKTGQQPAKKRLNFGQTGDSESVPDPQPLGEPPAAPSGLGPNTMASGGGAPMADNNEGADGVGNSSGNWHCDSTWLGDRVITTSTRTWALPTYNNHLYKQISNSTSGGSTNDNTYFGYSTPWGYFDFNRFHCHFSPRDWQRLINNNWGFRPKRLNFKLFNIQVKEVTTNEGTKTIANNLTSTVQVFTDSEYQLPYVLGSAHQGCLPPFPADVFMVPQYGYLTLNNGSQALGRSSFYCLEYFPSQMLRTGNNFQFSYTFEDVPFHSSYAHSQSLDRLMNPLIDQYLYYLVRTQTTGTGGTQILAFSQAGPSSMANQARNWVPGPSYRQQRVSTTKNQNNNSNFAWTGAAKFKLNGRNSLMNPGVAMASHKDDEDRFFPSSGVLIFGKQGAGNDGMDYSQVLITDEEEIKATNPVATEEYGEVAINDQAANTQAQTGLVHNQGVIPGMVWQNRDVYLQGPIWAKIPHTDGNFHPSPLMGGFGLKHPPPQILIKNTPVPADPPLTFNQAKLNSFITQYSTGQVSVEIEWELQKENSKRWNPEIQYTSNYYKSTNVDFAVNSDGVYSEPRPIGTRYLTRNL

SEQ ID NO: 43 - protein, 736 aa, Macaca fascicularis
MAADGYLPDWLEDNLSEGIREWWDLKPGAPKPKANQQKQDDGRGLVLPGYKYLGPFNGLDKGEPVNAADAAALEHDKAYDQQLKAGDNPYLRYNHADAEFQERLQEDTSFGGNLGRAVFQAKKRVLEPLGLVEEGAKTAPGKKRPVEQSPQEPDSSSGIGKTGQQPAKKRLNFGQTGDSESVPDPQPLGEPPAAPSGLGPNTMASGGGAPMADNNEGADGVGNSSGNWHCDSTWLGDRVITTSTRTWALPTYNNHLYKQISNSTSGGGTNDNTYFGYSTPWGYFDFNRFHCHFSPRDWQRLINNNWGFRPKRLNFKLFNIQVKEVTTNEGTKTIANNLTSTVQVFTDSEYQLPYVLGSAHQGCLPPFPADVFMVPQYGHLTLNNGSQALGRSSFYCLEYFPSQMLRTGNNFQFSYTFEDVPFHSSYAHSQSLDRLMNPLIDQYLYYLVRTQTTGTGGTQTLAFSQAGPSSMANQARNWVPGPSYRQQRVSTTKDQNNNSNFAWTGAAKFKLNGRNSLMNPGVAMASHKDDEDRFFPSSGVLIFGKQGAGNDGVDYSQVLITDEEEIKATNPVATEEYGEVAVNDQAANTQAQTGLVHNQGVIPGMVWQNRDVYLQGPIWAKIPHTDGNFHPSPLMGGFGLKHPPPQILIKNTPVPADPPLTLNQAKLNSFITQYSTGQVSVEIEWELQKENSKRWNPEIQYTSNYYKSTNVDFAVNSDGVYSEPRPIGTRYLTRNL

SEQ ID NO: 44 - protein, 730 aa, Macaca fascicularis
MAADGYLPDWLEDNLSEGIREWWALKPGAPQPKANQQKQDDGRGLVLPGYKYLGPFNGLDKGEPVNEADAAALEHDKAYDQQLKAGDNPYLRYNHADAEFQERLQEDTSFGGNLGRAVFQAKKRVLEPLGLVEEAAKTAPGKKRPVDSPDSTSGIGKKGQQPARKRLNFGQTGDAESVPDPQPIGEPPAAPSGLGSGTMAAGGGAPMADNNEGADGVGNAPGNWHCDSTWLGNRVITTSTRTWALPTYNNHLYKQISSSSSGATNDNHYFGYSTPWGYFDFNRFHCHFSPRDWPRLINNNWGFRPKRLRFKLFNIQVKEVTTNDGVTTIANNLTSTVQVFSDSEYQLPYVLGSAHQGCLPPFPADVFMIPQYGYLTLNNGSQSVGRSSFYCLEYFPSQMLRTGNNFEFSYEFEDVPFHSSYAHSQSLDRLMNPLIDQYPYYLARTQSSTGTSTRELQFHQAGPATMAEQSKNWLPGPCFRQQRISKTTDNNNNSNFAWTGATKYHLNGRNSLTNPGVPMATHKDDESVFFPINGVLVFGKTGASNKTTLENVLMTDEEEIKATNPVATEEYGVVSSNIQSQNSNPATQTVNNQGALPGMVWQNRDVYLQGPIWAKIPHTDGNFHPSPLMGGFGLKHPPPQILIKNTPVPANPPETFTPAKFASFITQYSTGQVSVEIEWELQKENSKRWNPEIQYTSNYDKQTGVDFAVDTQGVYSEPRPIGTRYLTRNL

SEQ ID NO: 45 - protein, 730 aa, Macaca fascicularis
MAADGYLPDWLEDNLSEGIREWWALKPGAPQPKANQQKQDDGRGLMLPGYKYLGPFNGLDKGEPVNEADAAALEHDKAYDQQLKAGDNPYLRYNHADAEFQERLQEDTSFGGNLGRAVFQAKKRVLEPLGLVEEAAKTAPGKKRPVDSPDSTSGIGKKGQQPARKRLNFGQTGDAESVPDPQPIGEPPAAPSGLGSGTMAAGGGAPMADNNEGADGVGNASGSWHCDSTWLGNRVITTSTRTWALPTYNNHLYKQISSSSSGATNDNHYFGYSTPWGYFDFNRFHCHFSPRDWQRLINNNWGFRPKRLRFKLFNIQVKEVTTNDGVTTIANNLTSTVQVFSDSEYQLPYVLGSAHQGCLPPFPADVFMIPQYGYLTLNNGRQSVGRSSFYCLEYFPSQMLRTGNNFEFSYEFEDVPFHSSYAHSQSLDRLMNPLIDQYPYYLARTQSSTGTSTRELQFHQAGPATMAEQSKNWLPGPCFRQQRISKTTDNNNNSNFAWTGATKYHLNGRNSLTNPGVPMATHKDDESVFFPINGVLVFGKTGASNKTTLENVPMTDEEEIKATNPVATEEYGVVSSNIQSQNSNPTTQTVNNQGALPGMVWQNRDVYLQGPIWAKIPHTDGNFHPSPLMGGFGLKHPPPQILIKNTPVPANPPETFTPAKFASFITQYSTGQVSVEIEWELQKENNKRWNPEIQYTSNYDKQTGVDFAVDTQGVYSEPRPIGTRYLTRNL

SEQ ID NO: 46 - protein, 730 aa, Macaca fascicularis
MAADGYLPDWLEDNLSEGIREWWALKPGAPQPKANQQKQDDGRGLVLPGYKYLGPFSGLDKGEPVNEADAAALEHDKAYDQQLKAGDNPYLRYNHADAEFQERLQEDTSFGGNLGRAVFQAKKRVLEPLGLVEEAAKTAPGKKRPVDSPDSTSGIGKKGQQPARKRLNFGQTGDAESVPDPQPIGEPPAAPSGLGSGTMAAGGGAPMADNNEGADGVGNASGNWHCDSTWLGNRVITTSTRTWALPTYNDHLYKQISSSSSGATNDNHYFGYSTPWGYFDFNRFHCHFSPRDWQRLINNNWGFRPKRLRFKLFNIQVKEVTTNDGVTTIANNLTSTVQVFSDSEYQLPYVLGSAHQGCLPPFPADVFMIPQYGYLTLNNGSQSVGRSSFYCLEYFPSQMLRTGNNFEFSYEFEDVPFHSSYAHSQSLDRLMNPLIDQYLYYLARTQSSTGTSTRELQFHQAGPATMAEQSKNWLPGPCFRQQRISKTTDNNNNSNFAWTGATKYHLNGRNSLTNPGVPMATHKDDESVFFPINGVLVFGKTGASNKTTLENVLMTDEEEIKATNPVATEEYGVVSSNIQSQNSNPTTQTVNNQGALPGMVWRNRDVYLQGPIWAKIPHTDGNFHPSPLMGGFGLKHPPPQILIKNTPVPANPPETFTPAKFASFITQYSTGQVSVEIEWELQKENSKRWNPEIQYTSNYDKQTGVDFAVDTQGVYSEPRPIGTRYLTRNL

SEQ ID NO: 47 - protein, 730 aa, Macaca fascicularis
MAADGYLPDWLEDNLSEGIREWWALKPGAPQPKANQQKQDDGRGLVLPGYKYLGPFNGLDKGEPVNEADAAALEHDKAYDQQLKAGDNPYLRYNHADAEFQERLQEDTSFGGNLGRAVFQAKKRVLEPLGLVEEAAKTAPGKKRPVDSPDSTSGIGKKGQQPARKRLNFGQTGDAESVPDPQPIGEPPAAPSGLGSGTMAAGGGAPMADNNEGADGVGNASGNWHCDSTWLGNRVITTSTRTWALPTYNNHLYKQISSSSSGATNDNHYFGYSTPWGYFDFNRFHCHFSPRDWQRLINNNWGFRPKRLRFKLFNIQVKEVTTNDGVTTIANNLTSTVQVFSDSEYQLPYVLGSAHQGCLPPFPADVFMIPQYGYLTLNNGSQSVGRSSFYCLEYFPSQMLRTGNNFEFSYEFEDVPFHSSYAHSQSLDRLMNPLIDQYLYYMARTQSSTGTSTREPQFHQAGPATMAEQSKNWLPGPCFRQQRISKTTDNNNNSNFAWTGATKYHLNGRNSLTNPGVPMATHKDDESVFFPINGVLVFGKTGASNKTTLENVLMTDEEEIKATNPVATEEYGVVSSNIQSQNSNPTTQTVNNQGALPGMVWQNRDVYLQGPIWAKIPHTDGDFHPSPLMGGFGLKHPPPQILIKNTPVPANPPETFTPAKFASFITQYSTGQVSVEIEWELQKENSKRWNPEIQYTSNYDKQTGVDFAVDTQGVYSEPRPIGTRYLTRNL

SEQ ID NO: 48 - protein, 730 aa, Macaca fascicularis
MAADGYLPDWLEDNLSEGIREWWALKPGAPQPKANQQKQDDGRGLVLPGYKYLGPFNGLDKGEPVNEADAAALEHDKAYDQQLKAGDNPYLRYNHADAEFQERLQEDTSFGGNLGRAVFQAKKRVLEPLGLVEEAAKTAPGKKRPVDSPDSTSGIGKKGQQPARKRLNFGQTGDAESVPDPQPIGEPPAAPSGLGSGTMAAGGGAPMADNNEGADGVGNASGNWHCDSTWLGNRVITTSTRTWALPTYNNHLYKQISSGSSGATNDNHYFGYSTPWGYFDFNRFHCHFSPRDWQRLINNNWGFRPKRLRFKLFNIQVKEVTTNDGVTTIANNLTSTVQVFSDSEYQLPYVLGSAHQGCLPPFPADVFMIPQYGYLTLNNGSQSVGRSSFYCLEYFPSQVLRTGNNFEFSYEFEDVPFHSSYAHSQSLDRLMNPLIDQYLYYLARTQSSTGTSTRELQFHQAGPATMAEQSKNWLPGPCFRQQRISKTSDNNNNSNFAWTGATKYHLNGRNSLTNPGVPMATHKDDESVFFPINGVLVFGKTGASNKTTLENVLMTDEEEIKATNPVATEEYGVVSSNIQSQNSNPTTQTVNNQGALPGMVWQNRDVYLQGPIWAKIPHTDGNFHPSPLMGGFGLKHPPPQILIKNTPVPANPPETFTPAKFASFITQYSTGQVSVEIEWELQKENSKRWNPEIQYTSNYDKQTGVDFAVDTQGVYSEPRPIGTRYLTRNL

SEQ ID NO: 49 - protein, 730 aa, Macaca fascicularis
MAADGYLPDWLEDNLSEGIREWWALKPGAPQPKANQQKQDDGRGLVLPGYRYLGPFNGLDKGEPVNEADAAALEHDKAYDQQLKAGDNPYLRYNHADAEFQERLQEDTSFGGNLGRAVFQAKKRILEPLGLVEEAAKTAPGKERPVDSPDSTSGIGKKGQQPARKRLNFGQTGDAESVPDPQPIGEPPAAPSGLGSGTMAAGGGAPMADNNEGADGVGNASGNWHCDSTWLGNRVITTSTRTWALPTYDNHLYKQISSSSSGATNDNHYFGYSTPWGYFDFNRFHCHFSPRDWQRLINNNWGFRPKRLRFKLFNIQVKEVTTNDGVTTIANNLTSTVQVFSDSEYQLPYVLGSAHQGCLPPFPADVFMIPQYGYLTLNNGSQSVGRSSFYCLEYFPSQMLRTGNNFEFSYEFEDVPFHSSYAHSQSLDRLMNPLIDQYLYYLARTQSSTGTSTRELQFHQAGPATMAEQSKNWLPGPCFRQQRISKTTDNNNNSNFAWTGATKYHLNGRNSLTNPGVPMATHKDDESVFFPINGVLVLGKTGASNKTTLENVLMTDEEEIKATNPVATEEYGVVSSNIQSQNSNPTTQTVNNQGALPGMVWQNRDVYLQGPIWAKIPHTDGNFHPSPLMGGFGLKHPPPQILIKNTPVPANPPETFTPAKFASFITQYSTGQVSVEIEWELQKENSKRWNPEIQYTSNYDKQTGVDFAVDTQGVYSEPRPIGTRYLTRNL

SEQ ID NO: 50 - protein, 730 aa, Macaca fascicularis
MAADGYLPDWLEDNLSEGIREWWALKPGAPRPKANQQKQDDGRGLVLPGYKYLGPFNGLDKGEPVNEADAAALEHDKAYDQQLKAGDNPYLRYNHADAEFQERLQEDTSFGGNLGRAVFQAKKRVLEPLGLVEEAAKTAPGKKRPVDSPDSTSGIGKKGQQPARKRLNFGQTGDAESVPDPQPIGEPPAAPSGLGSGTMAAGGGAPMADNNEGADGVGNASGNWHCDSTWLGNRVITTSTRTWALPTYNNHLYKQISSSSSGATNDNHYFGYSTPWGYFDFNRFHCHFSPRDWQRLINNNWGFRPKRLRFKLFNIQVKEVTTNDGVTTIANNLTSTVQVFSDSEYQLPYVLGSAHQGCLPPFPADVFMIPQYGYLTLNNGSQSVGRSSFYRLEYFPSQMLRTGNNFEFSYEFEDVPFHSSYAHSQSLDRLMNPLIDQYLYYLARTQSSTGTSTRELQFHQAGPATMAEQSKNWLPGPCFRQQRISKTTDNNNNSNFAWTGATKYHLNGRNSLTNPGVPMATHRDDESVFFPINGVLVFGKTGASNKTTLENVLMTDEEEIKATNPVATEEYGVVSSNIQSQNSNPTTQTVNNQGALPGMVWQNRDVYLQGPIWAKIPHTDGNFHPSPLMGGFGLKHPPPQILIKNTPVPANPPETFTPAKFASFITQYSTGQVSVEIEWELQKENSKRWNPEIQYTSNYDKQTGVDFAVDTQGVYSEPRPIGTRYLTRNL

SEQ ID NO: 51 - protein, 736 aa, Callithrix jacchus
MAADGYLPDWLEDNLSEGIREWWDLKPGAPKPKANQQKQDDGRGLVLPGYKYLGPFNGLDKGEPVNAADAAALEHDKAYDQQLKAGDNPYLRYNHADAEFQERLQEDTSFGGNLGRAVFQAKKRVLEPLGLVEEGAKTAPGKKRPVEQSPQEPDSSSGIGKTGQQPAKKRLNFGQTGDTESVPDPQPLREPPAAPSGLGPNTMASGGGAPMADNNEGADGVGNSSGNWHCDSTWLGDRVITTSTRTWALPTYNNHLYKQISNGTSGGSTNDNTYFGYSTPWGYFDFNRFHCHFSPRDWQRLINNNWGFRPKRLNFKPFNIQVKEVTTNEGTKTIANNPTSTVQVFTDSEYQLPYVLGSARQGCLPPFPADVFMVPQYGYLTLNNGSQALGRSSFYCLEYFPSQMLRTGDNFQFSYTFEDVPFHSSYAHSQSLDRLMNPLIDQYLYYLVRTQTTGTGGTQTLAFSQAGPSSMANQARNWVPGPCYRQQRVSTTTNQNNNSNFAWTGAAKFKLNGRDSLMNPGVAMASHKDDEDRFFPSSGVLIFGKQGAGNDGVDYSQVLITDEEEIKATNPVATEEYGAVAINNQAANTLAQTGLVHNQGVIPGMVWQNRDVYLQGPIWAKIPHTDGNFHPSPLMGGFGLKHPPPQILIKNTPVPADPPLTFNQAKLNSFITQYSTGQVSVEIEWELQKENSKRWNPEIQYTSNYYKSTNVDFAVNTEGVYSEPRPIGTRYLTRNL

SEQ ID NO: 52 - protein, 736 aa, Callithrix jacchus
MAADGYLPDWLEDNLSEGIREWWDLKPGAPKPKANQQKQDDGRGLVLPGYKYLGPFNGLDKGEPVNAADAAALEHDKAYDQQLKAGDNPYLRYNHADAEFQERLQEDTSFGGNLGRAVFQAKKRVLEPLGLVEEGANTAPGKKRPVEQSPQEPDSSSGIGKTGQQPAKKRLNFGQTGDSESVPDPQPLREPPAAPSGLGPNTMASGGGAPMADNNEGADGVGNSSGNWHCDSTWLGDRVITTSTRTWALPTYNNHLYKQISNGTSGGSTNDNTYFGYSTPWGYFDFNRFHCHFSPRDWQRLINSNWGFRPKRLNFKLFNIQVKEVTTNEGTKTIANNLTSTVQVFTDSEYQLPYVLGSAHQGCLPPFPADVFMVPQYGYLTLNNGSQALGRSSFYCLEYFPSQMLRTGNNFQFSYTFEDVPFHSSYAHSQSLDRLMNPLIDQYLYYLVRTQTTGTGGTQTLAFSQAGPSSMANQARNWVPGPCYRQQRVSTTTNQNNNSNFAWTGAAKFKLNGRDSLMNPGVAMASHKDDEDRFFPSSGVLIFGKQGAGNDGVDYSQVLITDEEEIKATNPVATEEYGAVAINNQAANTQAQTGLVHNQGVIPGMVWQNRDVYLQGPIWAKIPHTDGNFHPSPLMGGFGLKHPPPQILIKNTPVPADPPLTFNQAKLNSFITQYSTGQVSVEIEWELQKENSKRWNPEIQYTSNYYKSTNVDFAVNTEGVYSEPRPIGTRYLTRNL

SEQ ID NO: 53 - protein, 716 aa, Sus scrofa
MSFVDHPPDWLEEIGEGLKEFLGLEPGPPKPKPNQQKQDNARGLVLPGYNYLGPGNGLDRGEPVNRADEVAREHDISYNEQLQAGDNPYLKYNHADAEFQEKLADDTSFGGNLGKAVFQAKKRVLEPFGLVEEPAKTAAKGERIDDHYPKKKKARVEETEAGTSGGQQLQIPAQPASSLGADTMSAGGGSPLGDNNQGADGVGNASGDWHCDSTWMGDRVITKSTRTWVLPSYNNHLYKEIHSGSVDGSNANAYFGYSTPWGYFDFNRFHSHWSPRDWQRLVNNYWGFRPRSLKVKIFNIQVKEVTVQDATTTIANNLTSTVQVFTDDDYQLPYVIGNGTEGCLPAFPPQVFTLPQYGYATLNRNNTDDPTERSSFFCLEYFPSKMLRTGNSFEFTYSFEEVPFHCSFAPSQNLFKLANPLVDQYLYRFVSTDTSGNIQFQKNLKARYANTYKNWFPGPMCRTQGWYTGSGTYNRSGVTNFATSNRMDLEGASYQVNPQPNGMTNTLQDSNKYALENTMIFNSQNAEPGTTSLYQENNLLITSESETQPVNRVAYDTGGQMATNAQSTNLAPTVGTYNHQEMLPGSVWMDRDVYLQGPIWAKIPETGAHFHPSPAMGGFGLKHPPPMMLIKNTPVPSNVTAFSEIPVKSFITQYSTGQVTVEMEWELKKEDSKRWNPEIQYTNNYNNPEFVDFAPDTSGEYRTTRAIGTRYLTRPL

SEQ ID NO: 54 - protein, 716 aa, Sus scrofa
MSFVDHPPDWLEEIGEGLKEFLGLEPGPPKPKPNQQKQDNARGLVLPGYNYLGPGNGLDRGEPVNRADEVAREHDISYNEQLQAGDNPYLKYNHADAEFQEKLADDTSFGGNLGKAVFQAKKRALEPFGLVEEPAKTAAKGERIDDHYPKKKKARVEETEAGTSGGQQLQIPAQPASSLGADTMSAGGGSPLGDNNQGADGVGNASGDWHCDSTWMGDRVITKSTRTWVLPSYNNHLYKEIHSGSVDGSNANAYFGYSTPWGYFDFNRFHSHWSPRDWQRLVNNYWGFRPRSLKVKIFNIQVKEVTVQDATTTIANNLTSTVQVFTDDDYQLPYVIGNGTEGCLPAFPPQVFTLPQYGYATLNRNNTDDPTERSSFFCLEYFPSKMLRTGNSFEFTYSFEEVPFHCSFAPSQNLFKLANPLVDQYLYRFVGTDTSGNIQFQKNLKARYANTYKNWFPGPMCRTQGWYTGSGTYNRSGVTNFATSNRMDLEGASYQVNPQPNGMTNTLQDSNKYALENTMIFNSQNAEPGTTSLYQENNLLITSESETQPVNRVAYDTGGQMATNAQSTNLAPTVGTYNHQEMLPGSVWMDRDVYLQGPIWAKIPETGAHFHPSPAMGGFGLKHPPPMMLIKNTPVPSNVTAFSEIPVKSFITQYSTGQVTVEMEWELKKENSKRWNPEIQYTNNYNNPEFVDFAPDTSGEYRTTRAIGTRYLTRPL

SEQ ID NO: 55 - protein, 716 aa, Sus scrofa
MSFVDHPPDWFEEIGEGLKEFLGLEPGPPKPKPNQQKQDNARGLVLPGYNYLGPGNGLDRGEPANRADEVAREHDISYNEQLQAGDNPYLKYNHADAEFQEKLADDTSFGGNLGKAVFQAKKRVLEPFGLVEEPAKTAAKGERIDDHYPKKKKARVEETEAGTSGGQQLQIPAQPASSLGADTMSAGGGSPLGDNNQGADGVGNASGDWHCDSTWMGDRVITKSTRTWVLPSYNNHLYKEIHSGSVDGSNANAYFGYSTPWGYFDFNRFHSHWSPRDWQRLVNNYWGFRPRSLKVKIFNIQVKEVTVQDATTTIANNLTSTVQVFTDDDYQLPYVIGNGTEGCLPAFPPQVFTLPQYGYATLNRNNTDDPTERSSFFCLEYFPSKMLRTGNSFEFTYSFGEVPLHCSFAPSQNLFKLANPLVDQHLYRFVSTDTSGNIQFQKNLKARYANTYKNWFPGPMCRTQGWYTGSGTYNRPGVTNFATSNRMDLEGASYQVNPQPNGMTNTLQDSNKYALENTMIFNSQNAEPGTTSLYQENNLLITSESETQPVNRVAYDTGGQMATNAQSTNLAPTVGTYNHQEMLPGSVWMDRDVYLQGPIWAKIPETGAHFHPSPAMGGFGLKHPPPMMLTKNTPVPSNVTAFSEIPVKSFITQYSTGQVTVEMEWELKKENSKRWNPEIQYTNNYNNPEFVDFAPDTSGEYRTTRAIGTRYLTRPL

SEQ ID NO: 56 - protein, 716 aa, Sus scrofa
MSFVDHPPDWLEEIGEGLKEFLGLEPGPPKPKPNQQKQDNARGLVLPGYNYLGPGNGLDRGEPVNRADEVAREHDISYNEQLQAGDNPYLKYNHADAEFQEKLADDTSFGGNLGKAVFQAKKRVLEPFGLVEEPAKTAAKGERIDDHYPKKKKARVEETEAGTSGGQQLQIPAQPASSLGADTMSAGGGSPLGDNNQGADGVGNASGDWHCDSTWMGDRVITKSTRTWVLPSYNNHLYKEIHSGSVDGSNANAYFGYSTPWGYFDFNRFHSHWSPRDWQRLVNNYWGFRPRSLKVKIFNIQVKEVTVQDATTTIANNLTSTVQVFTDDDYQLPYVIGNGTEGCLPAFPPQVFTLPQYGYATLNRNNTDDPTERSSFFCLEYFPSKMLRTGNSFEFTYSFEEVPFHCSFAPSQNLFKLANPLVDQYLYRFVSTDTSGNIQFQKNLKARYANTYKNWFPGPMCRTQGWYTGSGTYNRSGVTNFATSNRMDLEGASYQVNPQPNGMTNTLQDSNKYALENTMIFNSQNAEPGTTSLYQENNLLITSESETQPVNRVAYDTGGQMATNAQSTNLAPTVGTYNHQEMLPGSVWMDRDVYLQGPIWAKIPETGAHFHPSPAMGGFGLKHPPPMMLIKNTPVPSNVTAFSEIPVKSFITQYSTGQVTVEMEWELKKENSKRWNPEIQYTNNYNNPEFVDFAPDTSGEYRTTRAIGTRYLTRPL

SEQ ID NO: 57 - protein, 716 aa, Sus scrofa
MSFVDHPPDWLEEIGEGLKEFLGLEPGPPKPKPNQQKQDNARGLVLPGYNYLGPGNGLDRGEPVNRADEVAREHGISYNEQLQAGDDPYLKYNHADAEFQEKLADDTSFGGNLGKAVFQAKKRVLEPFGLVEEPAKTAAKGERIDDHYPKKKKARVEETEAGTGGGQQLQIPAQPASSLGADTMSAGGGSPLGDNNQGADGVGNASGDWHCDSTWMGDRVITKSTRTWVLPSYNNHLYKEIHSGSVDGSNANAYFGYSTPWGYFDFNRFHSHWSPRDWQRLVNNYWGFRPRSLKVKIFNIQVKEVTVQDATTTIANNLTSTVQVFTDDDYQLPYVIGNGTEGCLPAFPPQVFTLPQYGYATLNRNNTDDPTERSSFFCLEYFPSKMLRTGNSLEFTYSFEEVPFHCSFAPSQNLFKLANPLVDQYLYRFVSTDTSGNIQFQKNLKARYANTYKNWFPGPMCRTQGWYTGSGTYNRSGVTNFATSNRMDLEGASYQVNPQPNGMTNTLQDSNKYALENTMIFNSQNAEPGTTSLYQENNLLITSESETQPVNRVAYDTGGQMATNAQSTNLAPTVGTYNHQEMLPGSVWMDRDVYLQGPIWAKIPETGAHFHPSPAMGGFGLKHPPPMMLIKNTPVPSNVTAFSEIPVKSFITQYSTGQVTVEMEWELKKENSKRWNPEIQYTNNYNNPEFVDFAPDTSGEYRTTRAIGTRYLTRPL

SEQ ID NO: 58 - protein, 716 aa, Sus scrofa
MSFVDHPPDWLEEIGEGLKEFLGLKPGPPKPKPNQQKQDNARGLVLPGYNYLGPGNGLGRGEPVNRADEVAREHDISYNEQLQAGDNPYLKYNHADAEFQEKLADDTSFGGNLGKAVFQAKKRVLEPFGLVEEPAKTAAKGERIDDHYPKKKKARVEETEAGTSGGQQLQIPAQPASSLGADTMSAGGGSPLGDNNQGADGVGNASGDWHCDSTWMGDRVITKSTRTWVLPSYNNHLYKEIHSGSVDGSNANAYFGYSTPWGYFDFNRFHSHWSPRDWQRLVNNYWGFRPRSLKVKIFNIQVKEVTVQDATTTIANNLTSTVQVFTDDDYQLPYVIGNGTEGCLPAFPPQVFTLPQYGYATLNRNNTDDPTERSSFFCLEYFPSKMLRTGNSFEFTYSFEEVPFHCSFAPSQNLFKLANPLVDQYLYRFVSTDTSGNIQFQKNLKARYANTYKNWFPGPMCRTQGWYTGSGTYNRSGVTNFATSNRMDLEGASYQANPQPNGMTNTLQDSNKYALENTMIFNSQNAEPGTTSLYQENNLLITSESETQPVNRVAYDTGGQMATNAQSTNLAPTVGTYNHQEMLPGSVWMDRDVYLQGPIWAKIPETGAHFHPSPAMGGFGLKHPPPMMLIKNTPVPSNVTAFSEIPVKSLITQYSTGQVTVEMEWELKKENSKRWNPEIQYTNNYNNPEFVDFAPDTSGEYRTTRAIGTRYLTRPL

SEQ ID NO: 59 - protein, 716 aa, Sus scrofa
MSFVDHPPDWLEEIGEGLKEFLGLEPGPPKPKPNQQKQDNARGLVLPGYNYLGPGNGLDRGEPVNRADEVAREHDISYNEQLQAGDNPYLKYNHADAEFQEKLADDTSFGGNLGKAVFQAKKRVLEPFGLVEEPAKTAAKGERIDDHYPKKKKARVEETEAGTSGGQQLQIPAQPASSLGADTMSAGGGSPLGDNNQGADGVGNASGDWHCDSTWMGDRVITKSTRTWVLPSYNNHLYKEIHSGSVDGSNANAYFGYSTPWGYFDFNRFHSHWSPRDWQRLVNNYWGFRPRSLKVKIFNIQVKEVTVQDATTTIANNLASTVQVFTDDDYQLPYVIGNGTEGCLPAFPPQVFTLPQYGYATLNRNNTDDPTERSSFFCLEYFPSKMLRTGNSFEFTYSFEEVPFHCSFAPSQNLFKLANPLVDQYLYRFVSTDTSGNIQFQKNLKARYANTYKNWFPGPMCRTQGWYTGSGTYNRSGVTNFATSNRMDLEGASYQVNPQPNGMTNTLQDSNKYALENTMIFNSQNAEPGTTSLYQENNLLITSESETQPVNRVAYDTGGQMATNAQSTNLAPTVGTYNHQEMLPGSVWMDRDVYLQGPIWAKIPETGAHFHPSPAMGGFGLKHPPPMMLIKNTPVPSNVTAFSEIPVKSFITQYSTGQVTVEMEWELKKENSKRWNPEIQYTNNYNNPEFVDFAPDTSGEYRTTRAIGTRYLTRPL

SEQ ID NO: 60 - protein, 716 aa, Sus scrofa
MSFVDHPPDWLEEIGEGLKEFLGLEPGPPKPKPNQQKQDNARGLVLPGYNYLGPGNGLDRGEPVNRADEVAREHDISYNEQLQAGDDPYLKYNHADAEFQEKLADDTSFGGNLGKAVFQAKKRVLEPFGLVEEPAKTAAKGERIDDHYPKKKKARVEETEAGTSGGQQLQIPAQPASSLGADTMSAGGGSPLGDNNQGADGVGNASGDWHCDSTWMGDRVITKSTRTWVLPSYNNHLYKEIHSGSVDGSNANAYFGYSTPWGYFDFNRFHSHWSPRDWQRLVNNYWGFRPRSLKVKIFNIQVKEVTVQDATTTIANNLTSTVQVFTDDDYQLPYVIGNGTEGCLPAFPPQVFTLPQYGYATLNRNNTDDPTERSSFFCLEYFPSKMLRTGNSFEFTYSFEEVPFHCSFAPSQNLFKLANPLVDQYLYRFVSTDTSGNIQFQKNLKARYANTYKNWFPGPMRRTQGWYTGSGTYNRSGVTNFATSNRMDLEGASYQVNPQPNGMTNTLQDSNKYALENTMIFNSQNAEPGTTSLYQENNLLITSESETQPVNRVAYDTGGQMATNAQSTNLAPTVGTYNHQEMLPGSVWMDRDVYLQGPIWAKIPETGAHFHPSPAMGGFGLKHPPPMMLIKNTPVPSNVTAFSEIPVKSFITQYSTGQVTVEMEWELKKENSKRWNPEIQYTNNYNNPEFVDFAPDTSGEYRTTRAIGTRYLTRPL

SEQ ID NO: 61 - protein, 716 aa, Sus scrofa
MSFVDHPPDWLEEIGEGLKEFLGLEPGPPKPKPNQQKQDNARGLVLPGYNYLGPGNGLDRGEPVNRADEVAREHDISYNEQLQAGDNPYLKYNHADAEFQEKLADDTSFGGNLGKAVFQAKKRVLEPFGLVEEPAKTAAKGERIDDHYPKKKKARVEETEAGTSGGQQLQIPAQPASSLGADTMSAGGGSPLGDNNQGADGVGNASGDWHCDSTWMGDRVITKSTRTWVLPSYNNHLYKEIHSGSVDGSNANAYFGYSTPWGYFDFNRFHSHWGPRDWQRLVNNYWGFRPRSLKVKIFNIQVKEVTVQDATTTIANNLTSTVQVFTDDDYQLPYVIGNGTEGCLPAFPPQVFTLPQYGYATLNRNNTDDPTERSSFFCLEYFPSKMLRTGNSFEFTYSFEGVPFHCSFAPSQNLFKLANPLVDQYLYRFVSTDTSGNIQFQKNLKARYANTYKNWFPGPMCRTQGWYTGSGTYNRSGVTNFATSNRMDLEGASYQVNPQPNGMTNTLQDSNKYALENTMIFNSQNAEPGTTSLYQENNLLITSESETQPVNRVAYDTGGQMATNAQSTNLAPTVGTYNHQEMLPGSVWMDRDVYLQGPIWAKIPETGAHFHPSPAMGGFGLKHPPPMMLIKNTPVPSNVTAFSEIPVKSFITQYSTGQVTVEMEWELKKENSKRWNPEIQYTNNYNNPEFVDFAPDTSGEYRTTRAIGTRYLTRPL

SEQ ID NO: 62 - protein, 716 aa, Sus scrofa
MSFVDHPPDWLEEIGEGLKEFLGLEPGPPKPKPNQQKRDNARGLVLPGYNYLGPGNGLDRGEPVNRVDEVARERDISYNEQLQAGDNPYLKYNHADAEFQEKLADDTSFGGNLGKAVFQAKKRVLEPFGLVEEPAKTAAKGERIDDHYPKKKKARVEETEAGTSGGQQLQIPAQPASSLGADTMSAGGGSPLGDNNQGADGVGNASGDWHCDSTWMGDRVITKSTRTWVLPSYNNHLYKEIHSGSVDGSNANAYFGYSTPWGYFDFNRFHSHWSPRDWQRLVNNYWGFRPRSLKVKIFNIQVKEVTVQDATTTIANNLTSTVQVFTDDDYQLPYVIGNGTEGCLPAFPLQVFTLPQYGYATLNRNNTDDPTERSSFFCLEYFPSKMLRTGNSFEFTYSFEEVPFHCSFAPSQNLFKLANPLVDQYLYRFVSTDTSGNIQFQKNLKARYANTYKNWFPGPMCRTQGWYTGSGTYNRSGVTNFATSNRMDLEGASYQVNPQPNGMTNTLQDSNKYALENTMIFNSQNAEPGTTSLYQENNLLITSESETQPVNRVAYDTGGQMATNAQSTNLAPTVGTYNHQEMLPGSVWMDRDVYLQGPIWAKIPETGAHFHPSPAMGGFGLKHPPPMMLIKNTPVPSNVTAFSEIPVKSFITQYSTGQVTVEMEWELKKENSKRWNPEIQYTNNYNNPEFVDFAPDTSGEYRTTRAIGTRYLTRPL

SEQ ID NO: 63 - protein, 716 aa, Sus scrofa
MSFVDHPPDWLEEIGEGLKEFLGLEPGPPKPKPNQQKQDNARGLVLPGYNYLGPGNGLDRGEPVNRADEVAREHDISYNEQLQAGDNPYLKYNHADAEFQEKLADDTSFGGNLGKAVFQAKKRVLEPFGLVEEPAKTAAKGERIDDHYPKKKKARVEETEAGTSGGQQLQIPAQPASSLGADTMSAGGGSPLGDNNQGADGVGNASGDWHCDSTWMGDRVITKSTRTWVLPSYNNHLYKEIHSGSVDGSNANAYFGYSTPWGYFDFNRFHSHWSPRDWQRLVNNYWGFRPRSLKVKIFNIQVKEVTVQDATTTIANNLTSTVQVFTDDDYQLPYVIGNGTEGCLPAFPPQVFTLPQYGYATLNRNNTDDPTERSSFFCLEYFPSKMLRTGNSFEFTYSFEEVPFHCSFAPSQNLFKLANPLVDQYLYRFVSTDTSGNIQFQKNLKARYANTYKNWFPGPMCRTQGWYTGSGTYNRSGVTNFATSNRMDLEGASYQVNPQPNGMTNTLQDSNKYALENTMIFNSQNAEPGTTSLYQENNLLITSESETQPVNRVAYDTGGQMATNAQSTNLAPTVGTYNHQEMLPGSVWMDRDVYLQGPIWAKIPETGAHFHPSPAMGGFGLKHPPPMMLIKNTPVPSNVTAFSEIPVKSFITQYSTGQVTVEMEWELKKENSKRWNPEIQYTNNYNNPEFVDFAPDTSGECRTTRAIGTRYLTRPL

SEQ ID NO: 64 - protein, 716 aa, Sus scrofa
MSFVDHPPDWLEEIGEGLKEFLGLEPGPPKPKPNQQKQDNARGLVLPGYNYLGPGNGLDRGEPVNRADEVAREHDISYNEQLQAGDNPYLKYNHADAEFQEKLADDTSFGGNLGKAVFQAKKRVLEPFGLVEEPAKTAAKGERIDDHYPKKKKARVEETEAGTSGGQQLQIPAQPASSLGADTMSAGGGSPLGDNNQGADGVGNASGDWHCDSTWMGDRVITKSTRTWVLPSYNNHLYKEIHSGSVDGSNANAYFGYSTPWGYFDFNRFHSHWSPRDWQRLVDNYWGFRPRSLKVKIFNIQVKEVTVQDATTTIANNLTSTVQVFTDDDYQLPYVIGNGTEGCLPAFPPQVFTLPQYGYATLNRNNTDDPTERSSFFCLEYFPSKMLRTGNSFEFTYSFEEVPFHCSFAPSQNLFKLANPLVDQYLYRFVSTDTSGNIQFQKNLKARYANTYKNWFPGPMCRTQGWYTGSGTYNRSGVTNFATSNRMDLEGASYQVNPQPNGMTNTLQDSNKYALENTMVFNSQNAEPGTTSLYQENNLLITSESETQPVNRVAYNTGGQMATNAQSTNLAPTVGTYNHQEMLPGSVWMDRDVYLQGPIWAKIPETGAHFHPSPAMGGFGLKHPPPMMLIKNTPVPSNVTAFSEIPVKSFITQYSTGQVTVEMEWELKKENSKRWNPEIQYTNNYNNPEFVDFAPDTSGEYRTTRAIGTRYLTRPL

SEQ ID NO: 65 - protein, 716 aa, Sus scrofa
MSFVDHPPDWLEEIGEGLKEFLGLEPGPPKPKPNQQKRDNARGLVLPGYNYLGPGNGLGRGEPVNRADEVAREHDISYNEQLQAGDNPYLKYNHADAEFQEKLADDTSFGGNLGKAVFQAKKRVLEPFGLVEEPAKTAAKGERIDDHYPKKKKARVEETEAGTSGGQQLQIPAQPASSLGADTMSAGGGSPLGDNNQGADGVGNASGDWHCDSTWMGDRVITKSTRTWVLPSYNNHLYKEIHSGSVDGSNANAYFGYSTPWGYFDFNRFHSHWSPRDWQRLVNNYWGLRPRSLKVKIFNIQVKEVTVQDATTTIANNLTSTVQVFTDDDYQLPYVIGNGTEGCLPAFPPQVFTLPQYGYATLNRNNTDDPTERSSFFCLEYFPSKMLRTGNSFEFTYSFEEVPFHCSFAPSQNLFKLANPLADQYLYRFVSTDTSGNIQFQKNLKARYANTYKNWFPGPMCRTQGWYTGSGTYNRSGVTNFATSNRMDLEGASYQVNPQPNGMTNTLQDSNKYALENTMISNSQNAEPGTTSLYRENNLLITSESETQPVNRVAYDTGGQMATNAQSTNLAPTVGTYNHQEMLPGSVWMDRDVYLQGPIWAKIPETGAHFHPSPAMGGFGLKHPPPMMLIKNTPVPSNVTAFSEIPVKSFITQYSTGQVTVEMEWELKKENSKRWNPEIQYTNNYNNPEFVDFAPDTSGEYRTTRAIGTRYLTRPL

SEQ ID NO: 66 - protein, 716 aa, Sus scrofa
MSFVDHPPDWLEEIGEGLKEFLGLEPGPPKPKPNQQKQDNARGLVLPGYNYLGPGNGLDRGEPVNRADEVAREHDISYNEQLQAGDNPYLKYNHADAEFQEKLADDTSFGGNLGKAVFQAKKRVLEPFGLVEEPAKTAAKGERIDDHYPKKKKARVEETEAGTSGGQQLQIPAQPASSLGADTMSAGGGSPLGDNNQGADGVGNASGDWHCDSTWMGDRVITKSTRTWVLPSYNNHLYKEIHSGSVDGSNANAYFGYSTPWGYFDFNRFHSHWSPRDWQRLVNNYWGFRPRSLKVKIFNIQVKEVTVQDATTTIANNLTSTVQVFTDDDYQLPYVIGNGTEGCLPAFPPQVFTLPQYGYATLNRNNTDDPTERSSFFCLEYFPSKMLRTGNSFEFTYSFEEVPFHCSFAPSQNLFKLANPLVDQYLYRFVSTDTSGNIQFQKNLKARYANTYKNWFPGPMCRTQGWYTGSGTYNRSGVTNFATSNRMDLEGASYQVNPQPNGMTNTLQDSNKYALENTMIFNSQNAEPGTTSLYQENNLLITSESGTQPVNRVAYDTGGQMATNAQSTNLAPTVGTYNHQEMLPGSVWMDRGVYLQGPIWAKIPETGAHFHPSPAMGGFGLKHPPPMMLIKNTPVPSNVTAFSEIPVKSFVTQYSTGQVTVEMEWELKKENSKRWNPEIQYTNNYNNPEFVDFAPDTSGEYRTTRAIGTRYLTRPL

SEQ ID NO: 67 - protein, 716 aa, Sus scrofa
MSFVDHPPDWLEEIGEGLKEFLGLEPGPPKPKPNQQKQDNARGLVLPGYNYLGPGNGLDRGEPVNRADEVAREHDISYNEQLQAGDNPYLKYNHADAEFQEKLADDTSFGGNLGKAVFQAKKRVLEPFGLVEEPAKTAAKGERIDDHYPKKKKARVEETEAGTSGGQQLQIPAQPASSLGADTMSAGGGSPLGDNNQGADGVGNASGDWHCDSTWMGDRVITKSTRTWVLPSYNNHLYKEIHSGSVDGSNAHAYFGYSTPWGYFDFNRFHSHWSPRDWQRLVNNYWGFRPRSLKVKIFNIQVKEVTVQDATTTIANNLTSTVQVFTDDDYQLPYVIGNGTEGCLPAFPPQVFTLPQYGYATLNRNNTDDPTERSSFFCLEYFPSKMLRTGNSFEFTYSFEEVPFHCSFAPSQNLFKLANPLVDQYLYRFVSTDTSGNIQFQKNLKARYANTYKNWFPGPMCRTQGWYTGSGTYNRSGVTNFATSNRMDLEGASYQVNPQPNGMTNTLQDSNKYALENTMIFNSQNAEPGTTSLYQENNLLITSESETQPVNRVAYDTGGQMATNAQSTNLAPTVGTYNHQEMLPGSVWMDRDVYLQGPIWAKIPETGAHFHPSPAMGGFGLKHPPPMMLIKNTPVPSNVTAFSEIPVKSFITQYSTGQVTVEMEWELKKENSKRWNPEIQYTNNYNNPEFVDFAPDTSGEYRTTRAIGTRYLTRPL

SEQ ID NO: 68 - protein, 716 aa, Sus scrofa
MSFVDHPPDWLEEIGEGLKEFLGLEPGPPKPKPNQQKRDNARGLVLPGYNYLGPGNGLDRGEPVNRADEVAREHDISYNEQLQAGDNPYLKYNHADAEFQEKLADDTSFGGNLGKAVFQAKKRVLEPFGLVEEPAKTAAKGERIDDHYPKKKKARVEETEAGTSGGQQLQIPAQPASSLGADTMSAGGGSPLGDNNQGADGVGNASGDWHCDSTWMGDRVITKSTRTWVLPSYNNHLYKEIHSGSVDGSNANAYFGYSTPWGYFDFNRFHSHWSPRDWQRLVNNYWGFRPRSLKVKIFNIQVKEVTVQDATTTIANNLTSTVQVFTDDDYQLPYVIGNGTEGCLPAFPPQVFTLPQYGYATLNRNNTDDPTERSSFFCLEYFPSKMLRTGNSFEFTYSFEEVPFHCSFAPSQNLFKLANPLVDQYLYRFVSTDTSGNIQFQKNLKARYANTYKNWFPGPMCRTQGWYTGSGTYNRSGVTNFATSNRMDLEGASYQVNPQPNGMTNTLQDSNKYALENTMIFNSQNAEPGTTSLYQENNLLITSESETQPVNRVAYDTGGQMATNAQSTNLAPTVGTYNHQEMLPGSVWMDRDVYLQGPIWAKIPETGAHFHPSPAMGGFGLKHPPPMMLIKNTPVPSNVTAFSEIPVKSFITQYSTGQVTVEMEWELKKENSKRWNPEIQYTNNYNNPEFVGFAPDTSGEYRTTRAIGTRYLTRPL

SEQ ID NO: 69 - protein, 716 aa, Sus scrofa
MSFVDHPPDWLEEIGEGLKEFLGLEPGPPKPKPNQQKQDNARGLVLPGYNYLGPGNGLDRGEPVNRADEVAREHDISYNEQLQAGDNPYLKYNHADAEFQEKLADDTSFGGNLGKAVFQAKKRVLEPFGLVEEPAKTAAKGERIGDHYPKKKKARVEETEAGTSGGQQPQIPAQPASSLGADTMSAGGGSPLGDNNQGADGVGNASGDWHCDSTWMGDRVITKSTRTWVLPSYNNHLYKEIHSGSVDGSNANAYFGYSTPWGYFDFNRFHSHWSPRDWQRLVNNYWGFRPRSLKVKIFNIQVKEVTVQDATTTIANNLTSTVQVFTDDDYQLPYVIGNGTEGCLPAFPPQVFTLPQYGYATLNRNNTDDPTERSSFFCLEYLPSKMLRTGNSFEFTYSFEEVPFHCSFAPSQNLFKLANPLVDQYLYRFVSTDTSGNIQFQKNLKARYANTYKNWFPGPMCRTQGWYTGSGTYNRSGVTNFATSNRMDLEGASYQVNPQPNGMTNTLQDSNKYALENTMIFNSQNAEPGTTSLYQENNLLITSESETQPVNRVAYNTGGQMATNAQSTNLAPTVGTYNHQEMLPGSVWMDRDVYLQGPIWAKIPETGAHFHPSPAMGGFGLKHPPPMMLIKNTPVPSNVTAFSEIPVKSFITQYSTGQVTVEMEWELKKENSKRWNPEIQYTNNYNNPEFVDFAPDTSGEYRTTRAIGTRYLTRPL

SEQ ID NO: 70 - protein, 716 aa, Sus scrofa
MSFVDHPPDWLEEIGEGLKEFLGLKPGPLKPKPNQQKQDNARGLVLPGYNYLGPGNGLDRGEPVNRADEVAREHDISYNEQLQAGDNPYLKYNHADAEFQEKLADDTSFGGNLGKAVFQAKKRVLEPFGLVEEPAKTAAKGERIDDHYPKKKKARVEETEAGTSGGQQLQIPAQPASSLGADTMSAGGGSPLGDNNQGADGVGNASGDWHCDSTWMGDRVITKSTRTWVLPSYNNHLYKEIHSGSVDGSNANAYFGYSTPWGYFDFNRFHSHWSPRDWQRLVNNYWGFRPRSLKVKIFNIQVKEVTVQDATTTIANNLTSTVQVFTDDDYQLPYVIGNGTEGCLPAFPPQVFTLPQYGYATLNRNNTDDPTERSSFFCLEYFPSKMLRTGNSFEFTYSFEEVPFHCSFAPSQNLFKLANPLVDQYLYRFVSTDTPGNIQFQKNLKARYANTYKNWFPGPMCRTQGWYTGSGTYNRSGVTNFATSNRMDLEGASYQANPQPNGMTNTLQDSNKYALENTMIFNSQNAEPGTTSLYQENNLLITSESETQPVNRVAYDTGGQMATNAQSTNLAPTVGTYNHQEMLPGSVWMDRDVYLQGPIWAKIPETGAHFHPSPAMGGFGLKHPPPMMLIKNTPVPSNVTAFSEIPVKSLITQYSTGQVTVEMEWELKKENSKRWNPEIQYTNNYNNPEFVDFAPDTSGEYRTTRAIGTRYLTRPL

SEQ ID NO: 71 - protein, 736 aa, Macaca mulatta
MAADGYLPDWLEDNLSEGIREWWDLKPGAPKPKANQQKQDDGRGLVLPGYKYLGPFNGLDKGEPANAADAAALEHDKAYDQQLKAGDNPYLRYNHADAEFQERLQEDTSFGGNLGRAIFQAKKRVLEPLGLVEEGAKTAPGKKGPVEQSPQEPDSSSGIGKTGQQPAKKRLNFGQTGDSESVPDPQPLGEPPAAPSGLGPNTMASGGGAPMADNNEGADGVGNSSGNWHCDSTWLGDRVITTSTRTWALPTYNNHLYKQISNGTSGGSTNDNTYFGYSTPWGYFDFNRFHCHFSPRDWQRLINNNWGFRPKRLNFKLFNIQVKEVTTNEGTKTIANNLTSTVQVFTDSEYQLPYVLGSAHQGCLPPFPADVFMVPQYGYLTLNNGSQALGRSSFYCLEYFPSQMLRTGNNFQFSYTFEDVPFHSSYAHSQSLDRLMNPLIDQYLYYLVRTQTTGTGGTQTLAFSQAGPSSMANQARNWVPGPCYRQQRVSTTTNQNNNSNFAWTGAAKFKLNGRDSLMNPGVAMASHKDDDDRFFPSSGVLIFGKQGTGNDGVDYSQVLITDEEEIKATNPVATEEYGAVAINNQAANTQAQTGLVHNQGVIPGMVWQNRDVYLQGPIWAKIPHTDGNFHPSPLMGGFGLKHPPPQILIKNTPVPADPPLTFNQAKLNSFITQYSTGQVSVEIEWELQKENSKRWNPEIQYTSNYYKSTNVDFAVNTEGVYSEPRPIGTRYLTRNL

SEQ ID NO: 72 - protein, 736 aa, Macaca mulatta
MAADGYLPDWLEDNLSEGIREWWDLKPGAPKPKANQQKQDDGRGLVLPGYKYLGPFNGLDKGEPVNAADAAALEHDKAYDQQLKAGDNPYLRYNHADAEFQERLQEDTSFGGNLGRAIFQAKKRVLEPLGLVEEGAKTAPGKKRPVEQSPQEPDSSSGIGKTGQQPAKKRLNFGQTGDSESVPDPQPLGEPPAAPSGLGPNTMASGGGAPMADNNEGADGVGNPSGNWHCDSTRLGDRVITTSTRTWALPTYNNHLYKQISNGTSGGSTNDNTYFGYSTPWGYFDFNRFHCHFSPRDWQRLINNNWGFRPKRLNFKLFNIQVKEVTTNEGTKTIANNLTSTVQVFTDSEYQLPYVLGSAHQGCLPPFPADVFMVPQYGYLTLNNGSQALGRSSFYCLEYFPSQMLRTSNNFQFSYTFEDVPFHSSYAHSQSLDRLMNPLIDQYLYYLVRTQTTGTGGTQTLAFSQAGPSSMANQARNWVPGPCYRQQRVSTTTNQNNNSNFAWTGAAKFKLNGRDSLMNPGVAMASHKDDDDRFFPSSGVLIFGKQGTGNDGVDYSQVLITDEEEIKATNPVATEEYGAVAINNQAANTQAQTGLVHNQGVIPGMVWQNRDVYLQGPIWAKIPHTDGNFHPSPLMGGFGLKLPPPQILIKNTPVPADPPLTFNQAKLNSFITQYSTGQVSVEIEWELQKENSKRWNPEIQYTSNYYKSTNVDFAVNTEGVYSEPRPIGTRYLTRNL

SEQ ID NO: 73 - protein, 736 aa, Macaca mulatta
MAADGYLPDWLEDNLSEGIREWWDLKPGAPKPKANQQKQDDGRGLVLPGYKYLGPFNGLDKGEPVNAADAAALEHDKAYDQQLKAGDNPYLRYNHADAEFQERLQEDTSFGGNLGRAIFQAKKRVLEPLGLVEEGAKTAPGKKRPVEQSPQEPDSPSGIGKTGQQPAKKRLNFGQTGDSESVPDPQPLGEPPAAPSGLGPNTMASGGGAPMADNNEGADGVGNSSGNWHCDSTWLGDRVITTSTRTWALPTYNNHLYKQISNGTSGGSTNDNTYFGYSTPWGYFDFNRFHCHFSPRDWQRLINNNWGFRPKRLNFKLFNIQVKEVTTNEGTKTIANNLTSTVQVFTDSEYQLPYVLGSAHQGCLPPFPADVFMVPQYGYLTLNNGSQALGRSSFYCLEYFPSQMLRTGNNFQFSYTFEDVPFHSSYAHSQSLDRLMNPLIDQYLYYLVRTQTTGTGGTQTLAFSQAGPSSMANQARNWVPGPCYRQQRVSTTTNQNNNSNFAWTGAAKFKLNGRDSLMNPGVAMASHKDDDDRFFPSSGVLIFGKQGTGNDGVDYSQVLITDEEEIKATNPVATEEYGAVAINNQAANTQAQTGLVHNQGVIPGMVWQNRDVYLQGPIWAKIPHTDGNFHPSPLMGGFGLKHPPPQILIKNTPVPADPPLTFNQAKLNSFITQYSTGQVSVEIEWELQKENSKRWNPEIQYTSNYYKSTNVDFAVNTEGVYSEPRPIGTRYLTRNL

SEQ ID NO: 74 - protein, 736 aa, Macaca mulatta
MAADGYLPDWLEDNLSEGIREWWDLKPGAPKPKANQQKQDDGRGLVLPGYKYLGPFNGLDKGEPVNAADAAALEHDKAYDQQLKAGDNPYLRYNHADAEFQERLQEDTSFGGNLGRAIFQAKRRVLEPLGLVEEGAKTAPGKKRPVEQSPQEPDSSSGIGKTGQQPAKKRLNFGQTGDSESVPDPQPLGEPPAAPSGLGPNTMASGGGAPMADNNEGADGVGNSSGNWHCDSTWLGDRVITTSTRTWALPTYNNHLYKQISNGTSGGSTNDNTYFGYSTPWGYFDFNRFHCHFSPRDWQRLINNNWGFRPKRLNFKLFNIQVKEVTTNEGTKTIANNLTSTVQVFTDSEYQLPYVLGSAHQGCLPPFPADVFMVPQYGYLTLNNGSQALGRSSFYCLEYFPSQMLRTSNNFQFSYTFEDVPFHSSCAHSQSLDRLMNPLIDQYLYYLVRTQTTGTGGTQTLAFSQAGPGSMANQARNWVPGPCYRQQRVSTTTNQNNNSNFAWTGAAKFKLNGRDSLMNPGVAMASHKDDDDRFFPSSGVLIFGKQGTGNDGVDYSQVLITDEEEIKATNPVATEEYGAVAINNQAANTQAQTGLVHNQGVIPGMVWQNRDVYLQGPIWAKIPHTDGNFHPPPLMGGFGLKHPPPQILIKNTPVPADPPLTFNQAKLNSFITQYSTGQVSVEIEWELQKENSKRWNPEIQYTSNYYKSTNVDFAVNTEGVYSEPRPIGTRYLTRNL

SEQ ID NO: 75 - protein, 736 aa, Macaca mulatta
MAADGYLPDWLEDNLSEGIREWWDLKPGAPKPKANQQKQDDGRGLVFPGYKYLGPFNGLDKGEPVNAADAAALEHDKAYDQQLKAGDNPYLRYNHADAEFQERLQEDTSFGGNLGRAIFQAKKRVLEPLGLVEEGAKTAPGKKRPVEQSPQEPDSSSGIGKTGRQPAKKRLNFGQTGDSESVPDPQPLGEPPAAPSGLGPNTMASGGGAPMADNNEGADGVGNSSGNWHCDSTWLGDRVITTSTRTWALPTYNNHLYKQISNGTPGGSTNDNTYFGYSAPWGYFDFNRFHCHFSPRDWQRLINNNWGFRPKRLNFKLFNIQVKEVTTNEGTKTIANNLTSTVQVFTDSEYQLPYVLGSAHQGCLPPFPADVFMVPQYGYLTLNNGSQALGRSSFYCLEYFPSQMLRTGNNFQFSYTFEDVPFHSSYAHSQSLDRLMNPLIDQYLYYLVRTQTTGTGGTQTLAFSQAGPSSMANQARNWVPGPCYRQQRVSTTTNQNNNSNFAWTGAAKFKLNGRDSLMNPGVAMASHKDDDDRFFPSSGVLIFGKQGTGNDGVDYSQVLITDEEEIKATNPVATEEYGAVAINNQAANTQAQTGLVHNQGVIPGMVWQNRDVYQQGPIWAKIPHTDGNFHPSPLMGGFGLKHPPPQILIKNTPVPADPPLTFNQAKLNSFITQYSTGQVSVEIEWELQKENSKRWNPEIQYTSNYYKSTNVDFAVNTEGVYSEPRPIGTRYLTRNL

SEQ ID NO: 76 - protein, 736 aa, Macaca mulatta
MAADGYLPDWLEDNLSEGIREWWDLKPGAPKPKANQQKQDDGRGLVLPGYKYLGPFNGLDKGEPVNAADAAALEHDKAYDQQLKAGDNPYLRYNHADAEFQERLQEDTSFGGNLGRAIFQAKKRVLEPLGLVEEGAKTAPGKKRPVEQSPQEPDSSSGIGKTGQQPAKKRLNSGQTGDSESVPDPQPLGEPPAAPSGLGPNTMASGGGAPMADNNEGADGVGNSSGNWHCDSTWLGDRVITTSTRTWALPTYNNHLYKQISNGTSGGSTNDNTYFGYSTPWGYFDFNRFHCHFSPRDWQRLINNNWGFRPKRLNFKLFNIQVKEVTTNEGTKTIANNLTSTVQVFTDSEYQLPYVLGSAYQGCLPPFPADVFMVPQYGYLTLNNGSQALGRSSFYCLEYFPSQMLRTGNNFQSSYTFEDVPFHSSYAHSQSLDRLMNPLIDQYLYYLVRTQTTGTGGTQTLAFSQAGPSSMANQARNWVPGPCYRQQRVSTTTNQNNNSNFAWTGAAKFKLNGRDSLMNPGVAMASHKDDDDRFFPSSGVLIFGKQGTGNDGVDYSQVLITDEEEIKATNPVATEEYGAVAINNQAANTQAQTGLVHNQGVIPGMVWQNRDVYLQGPIWAKIPHTDGNFHPSPLMGGFGLKHPPPQILIKNTPVPADPPLTFNQAKLNSFITQYSTGQVSVEIEWELQKENSKRWNPEIQYTSNYYKSTNVDFAVNTEGVYSEPRPIGTRYLTRNL

SEQ ID NO: 77 - protein, 736 aa, Macaca mulatta
MAADGYLPDWLEDNLSEGIREWWDLKPGASKPKANQQKQDDGRGLVLPGYKYLGPFNGLDKGEPVNAADAAALEHDKAYDQQLKAGDNPYLRYNHADAEFQERLQEDTSFGGNLGRAVFQAKKRVLEPLGLVEEGAKTVPGKKRPVEQSPQEPDSSSGIGKTGQQPAKKRLNFGQTGDSESVPDPQPLGEPPAAPSGLGPNTMASGGGAPMADNNEGADGVGNSSGNWHCDSTWLGDRVITTSTRTWALPTYNNHLYKQISNGTSGGSTNDNTYFGYSTPWGYFDFNRFHCHFSPRDWQRLINNNWGFRPKRLNFKLFNIQVKEVTTNEGTKTIANNLTSTVQVFTDSEYQLPYVLGSAYQGCLPPFPADVFMVPQYGYLTLNNGSQALGRSSFYCLEYFPSQMLRTGNNFQFSYTFEDVPFHSSYAHSQSLDRLMNPLIDQYLYYLVRTQTTGTGGTQTLAFSQAGPSSMANQARNWVPGPCYRQQRVSTTTNQNNNSNFAWTGAAKFKLNGRDSLMNPGVAMASHKDDDDRFFPSSGVLIFGKQGTGNDGVDYSQVLITDEEEIKATNPVATEEYGAVAINNQAANTQAQTGLVHNQGVIPGMVWQNRDVYLQGPIWAKIPHTDGNFHPSPLMGGFGLKHPPPQILIKNTPVPADPPLTFNQAKLNSFITQYSTGQVSVEIEWELQKENSKRWNPEIQYTSNYYKSTNVDFAVNTEGVYSEPRPIGTRYLTRNL

SEQ ID NO: 78 - protein, 736 aa, Macaca mulatta; identical to SEQ ID NO: 77

SEQ ID NO: 79 - protein, 737 aa, Macaca cyclopis
MAADGYLPDWLEDNLSEGIREWWALKPGAPKPKANQQKQDDGRGLVLPGYKYLGPFNGLDKGEPVNAADAAALEHDKAYDQQLQAGDNPYLRYNHADAEFQERLQEDTSFGGNLGRAVFQAKKRVLEPLGLVEEGAKTAPGKKRPVEQSPQEPDSSSGIGKKGQQPAKKRLNFGQTGDSESVPDPQPLGEPPAAPSSLGLNTMAAGGGAPMADNNEGADGVGSSSGNWHCDSTRLGDRVITTSTRTWALPTYNNHLYKQISNGTSGGSTNDNTYFGYSTPWGYFDFNRFHCHFSPRDWQRLINNNWGFRPKKLSFKLFNIQVKEVTQNEGTKTIANNLTSTIQVFTDSEYQLSYVLGSAHQGCLPPFPADVFMIPQYGYLTLNNGSQAVGRSSFYCLEYFPSQMLRTGNNFSFSYTFEDVPFHSSYAHSQSLDRLMNPLIDQYLYYLSRTQSTGGTAGTQQLLFSQAGPNNMSAQAKNWLPGPMYRQQRVSTTLSQNNNSNFAWTGGTKYHLNGRDSLVNPGVAMATNKDDEDRFFPSSGVLMFGKQGAGKDNVDYSSVMLTSEEEIKTTNPVATEQYGVVADNLQQQNTAPIVGAVNSQEALPGMVWQNRDVYLQGPIWAKIPHTDGNFHPSPLMGGFGLKHPPPQILIKNTPVPADPPTAFNQAKLNSFITQYSTGQVSVEIEWELQKENSKRWNPEIQYTSNYYKSTNVDFAVDTEGVYSEHRPIGTRYLTRNL

SEQ ID NO: 80 - protein, 737 aa, Macaca cyclopis
MAADGYLPDWLEDNLSEGIREWWALKPGAPKPKANQQKQDDGRGLVLPGYKYLGPFNGLDKGEPVNAADAAALEHDKAYDQQLQAGDNPYLRYNHADAEFQERLQEDTSFGGNLGRAVFQAKKRVLEPLGLVEEGAKTAPGKKRPVEQSPQEPDSSSGIGKKGQQPAKKRLNFGQTGDSESVPDPQPLGEPPAAPSSLGLNTMAAGGGAPMADNNEGADGVGSSSGNWHCDSTWLGDRVITTSTRTWALPTYNNHLYKQISNGTSGGSTNDNTYFGYSTPWGYFDFNRFHCHFSPRDWQRLINNNWGFRPKKLSFKLFNIQVKEVTQNEGTKTIANNLTSTIQVFTDSEYQLPYVPGSAHQGCLPPFPADVFMIPQYGYLTLNNGSQAVGRSSFYCLEYFPSQMLRTGNNFSFSYTFEDVPFHSSYAHSQSLDRLMNPLIDQYLYYLSRTQSTGGTAGTQQLLFSQAGPNNMSAQAKNWLPGPMYRQQRVSTTLSQNNNSNFAWTGGTKYHLNGRDSLVNPGVAMATNKDDEDRFFPSSGVLMFGKQGAGKDNVDYSSVMLTSEEEIKTTNPVATEQYGVVADNLQQQNTAPIVGAVNSQGALPGMVWQNRDVYPQGPIWAKIPHTDGNFHPSPLMGGFGLKHPPPQILIKNTPVPADPPTAFNQAKLNSFITQYSTGQVSVEIEWELQKENSKRWNPEIQYTSNYYKSTNVDFAVNTEGVYSEPRPIGTRYLTRNL

SEQ ID NO: 81 - protein, 737 aa, Macaca cyclopis
MAADGYLPDWLEDNLSEGIREWWALKPGAPKPKANQQKQDDGRGLVLPGYKYLGPFNGLDKGEPVNAADAAALEHDKAYDQQLQAGDNPYLRYNHADAEFQERLQEDTSFGGNLGRAVFQAKKRVLEPPGLVEEGAKTAPGKKRPVEQSPQEPDSSSGIGKKGQQPAKKRLNFGQTGDSESVPDPQPLGEPPAAPSSLGLNTMAAGGGAPMADNNEGADGVGSSSGNWHCDSTWLGDRVITTSTRTWALPTYNNHLYKQISNGTSGGSTNDNTYFGYSTPWGYFDFNRFHCHFSPRDWQRLINNNWGFRPKKLSFKLFNIQVKEVTQNEGTKTIANNLTSTIQVFTDSEYQLPYVLGSAHQGCLPPFPADVFMIPQYGYLTLNNGSQAVGRSFFYCLEYFPSQMLRTGNNFSFSYTFEDVPFHSSYAHSQSLDRLMNPLIDQYLYYLSRTQSTGGTAGTQQLLFSQAGPNNMSAQAKNWLPGPMYRQQRVSTTLSQNNNSNFAWTGGTKYHLNGRDSLVNPGVAMATNKDDEDRFFPSSGVLMFGKQGAGKDNVDYSSVMLTSEEEIKTTNPVATEQYGVVADNLQQQNTAPIVGAVNSQGALPGMVWQNRDVYLQGPIWAKIPHTDGNFHPSPLMGGFGLKHPPPQILIKNTPVPADPPTAFNQAKLNSFITQYSTGQVSVEIERELQKENSKRWNPEIQYTSNYYKSTNVDFAVNTEGVYSEPRPIGTRYLTRNL

SEQ ID NO: 82 - protein, 737 aa, Macaca cyclopis
MAADGYLPDWLEDNLSEGIREWWALKPGAPKPKANQQKQDDGRGLVLPGYKYLGPFNGLDKGEPVNAADAAALEHDKAYDQQLQAGDNPYLRYNHADAEFQERLQEDTSFGGNLGRAVFQAKKRVLEPLGLVEEGAKTAPGKERPVEQSPQEPDSSSGIGKKGQQPAKKRLNFGQTGDSESVPDPQPLGEPPAAPSSLGLNTMAAGGGAPMADNNEGADGVGSSSGNWHCDSTWLGDRVITTSTRTWALPTYNNHLYKQISNGTSGGSTNDNTYFGYSTPWGYFDFNRFHCHFSPRDWQRLINNNWGFRPKKLSFKLFNIQVKEVTQNEGTKTIANNLTSTIQVFTDSEYQLPYVLGSAHQGCLPPFPADVFMIPQYGYLTLNNGSQAVGRSSFYCLEYFPSQMLRTGNNFSFSYTFEDVPFHSSYAHSQSLDRLMNPLIDQYLYYLSRTQSTGGTAGTQQLLFSQAGPNNMSAQAKNWLPGPMYRQQRVSTTLSQNNNSNFAWTGGTKYHLNGRDSLVNPGVAMATNKDDEDRFFPSSAVLMFGKQGAGKDNVDYSSVMLTSEEEIKTTNPVTTEQYGVVADNLQQQNTAPIVGAVNSQGALPGMVWQNRDVYLQGPIWAKIPHTDGNFHPSPLMGGFGLKHPPPQILIKNTPVPADPPTAFNQAKLNSFITQYSTGQVSVEIEWELQKENSKRWNPEIQYTSNYYKSTNVDFAVNTESVYSEPRPIGTRYLTRNL

SEQ ID NO: 83 - protein, 737 aa, Macaca cyclopis
MAADGYLPDWLEDNLSEGIREWWALKPGAPKPKANQQKQDDGRGLVLPGYKYLGPFNGPDKGEPVNAADAAALEHDKAYDQQLQAGDNPYLRYNHADAEFQERLQEDTSFGGNLGRAVFQAKKRVLEPLGLVEEGAKTAPGKKRPVEQSPQEPDSSSGIGKKGQQPAKKRLNFGQTGDSESVPDPQPLGEPPAAPSSLGLNTMAAGGGAPMADNNEGADGVGSSSGNWHCDSTWLGDRVITTSTRTWALPTYNNHLYKQISNGTSGGSTNDNTYFGYSTPWGYFDFNRSHCHFSPRDWQRLINNNWGFRPKKLSFKLFNIQVKEVTQNEGTKTIANNLTSTIQVFTDSEYQLPYVLGSAHQGCLPPFPADVFMIPQYGYLTLNNGSQAVGRSSFYCLEYFPSQMLRTGNNFSFSYTFEDVPFHSSYAHSQSLDRLMNPLIDQYLYYLSRTQSTGGTAGTQQLLFSQAGPNNMSAQAKNWLPGPMYRQQRVSTTLSQNNNSNFAWTGGTKYHLNGRDSLVNPGVAMATNKDDEDRFFPSSGVLMFGKQGAGKDNVDYSSVMLTSEEEIRTTNPVATEQYGVVADNLQQQNTAPIVGAVNSQGALPGMVWQNRDVYLQGPIWAKIPHTDGNFHPSPLMGGFGLKHPPPQILIKNTPVPADPPTAFNQAKLNSFITQYSTGQVSVEIEWELQKENSKRWNPEIQYTSNYYKSTNVDFAVNTEGVYSEPRPIGTRYLTRNL

SEQ ID NO: 84 - protein, 737 aa, Macaca cyclopis
MAADGYLPDWLEDNLSEGIREWWALKPGAPKPKANQQKQDDGRGLVLPGYKYLGPFNGLDKGEPVNAADAAALEHDKAYDQQLQAGDNPYLRYNHADAEFQERLQEDTSFGGNLGRAVFQAKKRVLEPLGLVEEGAKTAPGKKRPVEQSPQEPDSSSGIGKKGQQPAKKRLNFGQTGDSESVPDPQPLGEPPAAPSSLGLNTMAAGGGAPMADNNEGADGVGSSSGNWHCDSTWLGDRVITTSTRTWALPTYNNHLYKQISNGTSGGSTNDNTYFGYSTPWGYFDFNRFHCHFSPRDWQRLINNNWGFRPKKLSFKLFNIQVKEVTQNEGTKTIANNLTSTIQVFTDSEYQLPYVLGSAHQGCLPPFPADVFMIPQYGYLTLNNGSQAVGRSSFYCLEYFPSQMLRTGNNFSFSYTFEDVPFHSSYAHSQSLDRLMNPLIDQYLYYLSRTQSTGGTAGTQQLLFSQAGPNNMSAQAKNWLPGPMYRQQRVSTTLSQNNNSNFAWTGGTKYHLNGRDSLVNPGVAMATNKDDEDRLFPSSGVLMFGKQGAGKDNVDYSSVMLTSEEEVKTTNPVATEQYGVVADNLQQQNTAPIVGAVNSQGALPGMVWQNRDVYLQGPIWAKIPHTDGNFHPSPLMGGFGLKHPPPQILIKNTPVPADPPTAFNQAKLNSFITQYSTGQVSVEIEWELQKENSKRWNPEIQYTSNYYKSTNVDFAVNTEGVYSEPRPIGTRYLTRNL

SEQ ID NO: 85 - protein, 737 aa, Macaca cyclopis
MAADGYLPDWLEDNLSEGIREWWALKPGAPKPKANQQKQDDGRGLVLPGYKYLGPFNGLDKGEPVNAADAAALEHDKAYDQQLQAGDNPYLRYNHADAEFQERLQEDTSFGGNLGRAVFQAKRRVLEPLGLVEEGAKTAPGKKRPVEQSPQEPDSSSGIGKKGQQPAKKRLNFGQTGDSESVPDPQPLGEPPAAPSSLGLNTMAAGGGAPMADNNEGADGVGSSSGNWHCDSTWLGDRVITTSTRTWALPTYNNHLYKQISNGTSGGSTNDNTYFGYSTPWGYFDFNRFHCHFSPRDWQRLINNNWGFRPKKLSFKLFNIQVKEVTQNEGTKTIANNLTSTIQVFTDSEYQLPYVLGSARQGCLPPFPADVFMIPQYGYLTLNNGSQAVGRSSFYCLEYFPSQMLRTGNNFSFSYTFEDVPFHSSYAHSQSLDRLMNPLIDQYLYYLSRTQSTGGTAGTQQLLFSQAGPNNMSAQAKNWLPGPMYRQQRVSTTLSQNNNSNFAWTGGTKYHLNGRDSLVNPGVAMATNKDDEDRFFPSSGVLMFGKQGAGKDNVDYSSVMLTSEEEIKTTNPVATEQYGVVADNLQQQNTAPIVGAVNSQGALPGMVWQNRDVYLQGPIWAKIPHTDGNFHPSPLMGGFGLKHPPPQILIKNTPVPADPPTAFNQAKLNSFITQYSTGQVSVEIEWELQKENSKRWNPEIQYTSNYYKSTNVDFAVDTEGVYSEPRPIGTRYLTRNL

SEQ ID NO: 86 - protein, 737 aa, Macaca cyclopis
MAADGYLPDWLEDNLSEGIREWWALKPGAPKPKANQQKQDDGRGLVLPGYKYLGPFNGLDKGEPVNAADAAALEHDKAYDQQLQAGDNPYLRYNHADAEFQERLQEDTSFGGNLGRAVFQAKKRVLEPLGLVEEGAKTAPGKKRPVEQSPQEPDSSSGIGKKGQQPAKKRLNFGQTGDSESVPDPQPLGEPPAAPSSLGLNTMAAGGGAPMADNNEGADGVGSSSGNWHCDSTWLGDRVITTSTRTWALPTYNNHLYKQISNGTSGGSTNDNTYFGYSTPWGYFDFNRFHCHFSPRDWQRLINNNWGFRPKKLSFKLFDIQVKEVTQNEGTKTIANNLTSTIQVFTDSEYQLPYVLGSAHQGCLPPFPADVFMIPQYGYLTLNNGSQAVGRSSFYCLEYFPSQMLRTGNNFSFSYTFEDVPFHSSYAHSQSLDRLMNPLIDQYLYYLSRTQSTGGTAGTQQLLFSQAGPNNMSAQAKNWLPGPMYRQQRVSTTLSQNNNSNFAWTGGTKYHLNGRDSLVNPGVAMATNKDDEDRFFPSSGVLMFGKQGAGKDNVDYSSVMLTSEEEIKTTNPVATEQYGVVADNLQQQNTAPIVGAVNSQGALPGMVWQNRDVYLQGPIWAKIPHTDGNFHPSPLMGGFGLKHPPPQILIKNTPVPADPPTAFNQAKLNSFITQYSTGQVSVEIEWELQKENSKRWNPEIQYTSNYYKSTNVDFAVNTEGVYSEPRPIGTRYLTRNL

SEQ ID NO: 87 - protein, 737 aa, Macaca cyclopis
MAADGYLPDWLEDNLSEGIREWWALKPGAPKPKANQQKQDDGRGLVLPGYKYLGPFNGLDKGEPVNAADAAALEHDKAYDQQLQAGDNPYLRYNHADAEFQERLQEDTSFGGNLGRAVFQAKKRVLEPLGLVEEGAKTAPGKKRPVEQSPQEPDSSSGIGKKGQQPAKKRLNFGQTGDSESVPDPQPLGEPPAAPSSLGLNTMAAGGGAPMADNNEGADGVGSSSGNWHCDSTWLGDRVITTSTRTWALPTYNNHLYKQISNGTSGGSTNDNTYFGYSTPWGYFDFNRFHCHFSPRDWQRLINNNWGFRPKKLSFKLFNIQVKEVTQNEGTKTIANNLTSTIQVFTDSEYQLPYVLGSAHQGCLPPFPADVFMIPQYGYLTLNNGSQAVGRSSFYCLEYFPSQMLRTGNNFSFSYTFEDVPFHSSYAHSQSLDRLMNPLIDQYLYYLSRTQSTGGTAGTQQLLFSQAGPNNMSAQAKNWLPGPMYRQQRVSTTLSQNNNSNFAWTGGTKYHLNGRDSLVNPGVAMATNKDDEDRFFPSSAVLMFGKQGAGKDNVDYSSVMLTSEEEIKTTNPVATEQYGVVADNLQQQNTAPIVGAVNSQGALPGMVWQNRDVYLQGPIWAKIPHTDGNFHPSPLMGGFGLKHPPPQILIKNTPVPADPPTAFNQAKLNSFITQYSTGQVSVEIEWELQKENSKRWNPEIQYTSNYYKSTNVDFAVNTESVYSEPRPIGTRYLTRNL

SEQ ID NO: 88 - protein, 737 aa, Macaca cyclopis
MAADGYLPDWLEDNLSEGIREWWALKPGAPKPKANQQKQDDGRGLVLPGYKYLGPFNGLDKGEPVNAADAAALEHDKAYDQQLQAGDNPYLRYNHADAEFQERLQEDTSFGGNLGRAVFQAKKRVLEPLGLVEEGAKTAPGKKRPVEQSPQEPDSSSGIGKKGQQPAKKRLNFGQTGDSESVPDPQPLGEPPAAPSSLGLNTMAAGGGAPMADNNEGADGVGSSSGNWHCDSTWLGDRVITTSTRTWALPTYNNHLYKQISNGTSGGSTNDNTYFGYSTPWGYFDFNRFHCHFSPRDWQRLINNNWGFRPKKLSFKLFNIQVKEVTQNEGTKTIANNLTSTIQVFTDSEYQLPYVLGSAHQGCLPPFPADVFMIPQYGYLTLNNGSQAVGRSSFYCLEYFPSQMLRTGNNFSFSYTFEDVPFHSSYAHSQSLDRLMNPLIDQYLYYLSRTQSTGGTAGTQQLLFSQAGPNNMSAQAKNWLPGPMYRQQRVSTTLSQNNNSNFAWTGGTKYHLNGRDSLVYPGVAMATNKDDEDRFFPSSGVLMFGKQGAGKDNVDYSSVMLTSEEEIKTTNPVATEQYGVVADNLQQQNTAPIVGAVNSQGALPGMVWQNRDVYLQGPIWAKIPHTDGNFHPSPLMGGFGLKHPPPQILIKNTPVPADPPTAFNQAKLNSFITQYSTGQVSVEIEWELQKENSKRWNPEIQYTSNYYKSTNVDFAVNTEGVYSEPRPIGTRYLTRNL

SEQ ID NO: 89 - protein, 737 aa, Macaca cyclopis
MAADGYLPDWLEDNLSEGIREWWALKPGAPKPKANQQKQDDGRGLVLPGYKYLGPFNGLDKGGPVNAADAAALEHDKAYDQQLQAGDNPYLRYNHADAEFRERLQEDTSFGGNLGRAVFQAKKRVLEPLGLVEEGAKTAPGKKRPVEQSPQEPDSSSGIGKKGQQPAKKRLNFGQTGDSESVPDPQPLGEPPAAPSSLGLNTMAAGGGAPMADNNEGADGVGSSSGNWHCDSTWLGDRVITTSTRTWALPTYNNHLYKQISNGTSGGSTNDSTYFGYSTPWGYFDFNRSHCHFSPRDWQRLINNNWGFRPKKLSFKLFNIQVKEVTQNEGTKTIANNLTSTIQVFTDSEYQLPYVLGSAHQGCLPPFPADVFMIPQYGYLTLNNGGQAVGRSSFYCLEYFPSQMLRTGNNFSFSYIFEDVPFHSSYAHSQSLDRLMNPLIDQYLYYLSRTQSTGGTAGTQQLLFSQAGPNNMSAQAKNWLPGPMYRQQRVSTTLSQNNNSNFAWTGGTKYHLNGRDSLVNPGVAMATNKDDEDRFFPSSGVLMFGKQGAGKDNVDYSSVMLTSEEEIKTTNPVATEQYGVVADNLQQQNTAPIVGAVNSQGALPGMVWQNRDVYLQGPIWAKIPHTDGNFHPSPLMGGFGLKHPPPQILIKNTPVPADPPTAFNQAKLNSFITQYSTGQVSVEIEWELLKESSKRWNPEIQYTSNYYKSTNVDFAVNTEGVYSEPRPIGTRYLTRNL

SEQ ID NO: 90 - protein, 737 aa, Adeno-Associated Virus
MAADGYLPDWLEDNLSEGIREWWDLKPGAPKPKANQQKQDDGRGLVLPGYKYLGPFNGLDKGEPVNAADAAALEHDKAYDQQLKAGDNPYLRYNHADAEFQERLQEDTSFGGNLGRAVFQAKKRVLEPLGLVEEGAKTAPGKKRPVEPSPQRSPDSSTGIGKKGQQPAKKRLNFGQTGDSESVPDPQPIGEPPAGPSGLGSGTMAAGGGAPMADNNEGADGVGSSSGNWHCDSTWLGDRVITTSTRTWALPTYNNHLYKQISNGTSGGSTNDNTYFGYSTPWGYFDFNRFHCHFSPRDWQRLINNNWGFRPKRLNFKLFNIQVKEVTQNEGTKTIANNLTSTIQVFTDSEYQLPYVLGSAHQGCLPPFPADVFMIPQYGYLTLNNGSQAVGRSSFYCLEYFPSQMLRTGNNFEFSYQFEDVPFHSSYAHSQSLDRLMNPLIDQYLYYLSKTINGSGQNQQTLKFSVAGPSNMAVQGRNYIPGPSYRQQRVSTTVTQNNNSEFAWPGASSWALNGRNSLMNPGPAMASHKEGEDRFFPLSGSLIFGKQGTGRDNVDADKVMITNEEEIKTTNPVATESYGQVATNHQSAQAQAQTGWVQNQGILPGMVWQNRDVYLQGPIWAKIPHTDGNFHPSPLMGGFGLKHPPPQILIKNTPVPADPPTTFSQAKLASFITQYSTGQVSVEIEWELQKENSKRWNPEIQYTSNYYKSTNVDFAVNTDGTYSEPRPIGTRYLTRNL

SEQ ID NO: 91 - protein, 737 aa, Adeno-Associated Virus
MAADGYLPDWLEDNLSEGIREWWDLKPGAPKPKANQQKQDDGRGLVLPGYKYLGPFNGLDKGEPVNAADAAALEHDKAYDQQLKAGDNPYLRYNHADAEFQERLQEDTSFGGNLGRAVFQAKKRVLEPLGLVEEGAKTAPGKKRPVEPSPQRSPDSSTGIGKKGQQPAKKRLNFGQTGDSESVPDPQPIGEPPAGPSGLGSGTMAAGGGAPMADNNEGADGVGSSSGNWHCDSTWLGDRVITTSTRTWALPTYNNHLYKQISNSTSGGSSNDNTYFGYSTPWGYFDFNRFHCHFSPRDWQRLINNNWGFRPKRLNFKLFNIQVKEVTDNNGVKTIANNLTSTIQVFTDSEYQLPYVLGSAHQGCLPPFPADVFMIPQYGYLTLNDGSQAVGRSSFYCLEYFPSQMLRTGNNFEFSYQFEDVPFHSSYAHSQSLDRLMNPLIDQYLYYLSRTINGSGQNQQTLKFSVAGPSNMAVQAKNWLPGPCYRQQRVSTTVTQNNNSEFAWPGATKYHLNGRDSLVNPGVAMASHKEGEDRFFPLSGSLMFGKQGTGRDNVDADKVMLTSEEEIKTTNPVATEQYGVVATNHQSAQAQAQTGWVQNQGILPGMVWQNRDVYLQGPIWAKIPHTDGNFHPSPLMGGFGLKHPPPQILIKNTPVPADPPTTFSQAKLASFITQYSTGQVSVEIEWELQKENSKRWNPEIQYTSNYYKSNNVEFAVNTEGTYSEPRPIGTRYLTRNL

SEQ ID NO: 92 - protein, 731 aa, Adeno-Associated Virus
MAADGYLPDWLEDNLSEGIREWWALKPGAPQPKANQQKQDDGRGLVLPGYKYLGPFNGLDKGEPVNEADAAALEHDKAYDQQLKAGDNPYLRYNHADAEFQERLQEDTSFGGNLGRAVFQAKKRVLEPLGLVEEAAKTAPGKKRPVDSPDSTSGIGKKGQQPARKRLNFGQTGDAESVPDPQPIGEPPAAPSGLGSGTMAAGGGAPMADNNEGADGVGNASGNWHCDSTWLGNRVITTSTRTWALPTYNNHLYKQISSSSSGATNDNHYFGYSTPWGYFDFNRFHCHFSPRDWQRLINNNWGFRPKRLRFKLFNIQVKEVTTNDGVTTIANNLTSTVQVFSDSEYQLPYVLGSAHQGCLPPFPADVFMIPQYGYLTLNNGSQSVGRSSFYCLEYFPSQMLRTGNNFEFSYEFEDVPFHSSYAHSQSLDRLMNPLIDQYLYYLSKTINGSGQNQQTLKFSVAGPSNMAVQGRNYIPGPSYRQQRVSTTVTQNNNSEFAWPGASSWALNGRNSLMNPGPAMASHKEGEDRFFPLSGSLIFGKQGTGRDNVDADKVMITNEEEIKTTNPVATESYGQVATNHQSAQAQAQTGWVQNQGILPGMVWQNRDVYLQGPIWAKIPHTDGNFHPSPLMGGFGLKHPPPQILIKNTPVPANPPETFTPAKFASFITQYSTGQVSVEIEWELQKENSKRWNPEIQYTSNYDKQTGVDFAVDTQGVYSEPRPIGTRYLTRNL

SEQ ID NO: 93 - protein, 732 aa, Adeno-Associated Virus
MAADGYLPDWLEDNLSEGIREWWALKPGAPQPKANQQKQDDGRGLVLPGYKYLGPFNGLDKGEPVNEADAAALEHDKAYDQQLKAGDNPYLRYNHADAEFQERLQEDTSFGGNLGRAVFQAKKRVLEPLGLVEEAAKTAPGKKRPVDSPDSTSGIGKKGQQPARKRLNFGQTGDAESVPDPQPIGEPPAAPSGLGSGTMAAGGGAPMADNNEGADGVGNASGNWHCDSTWLGNRVITTSTRTWALPTYNNHLYKQISNSTSGGSSNDNHYFGYSTPWGYFDFNRFHCHFSPRDWQRLINNNWGFRPKRLRFKLFNIQVKEVTDNNGVKTIANNLTSTVQVFSDSEYQLPYVLGSAHQGCLPPFPADVFMIPQYGYLTLNDGSQAVGRSSFYCLEYFPSQMLRTGNNFEFSYEFEDVPFHSSYAHSQSLDRLMNPLIDQYLYYLARTINGSGQNQQTLKFSVAGPSNMAVQSKNWLPGPCFRQQRVSTTVTQNNNSEFAWPGATKYHLNGRNSLTNPGVPMASHKEGEDRFFPLSGSLVFGKQGTGRDNVDADKVLMTDEEEIKATNPVATEEYGVVATNHQSAQAQAQTGWVQNQGILPGMVWQNRDVYLQGPIWAKIPHTDGNFHPSPLMGGFGLKHPPPQILIKNTPVPANPPETFTPAKFASFITQYSTGQVSVEIEWELQKENSKRWNPEIQYTSNYYKSNNVEFAVNTEGVYSEPRPIGTRYLTRNL

SEQ ID NO: 94 - protein, 736 aa, Adeno-Associated Virus
MAADGYLPDWLEDNLSEGIREWWDLKPGAPKPKANQQKQDNGRGLVLPGYKYLGPFNGLDKGEPVNAADAAALEHDKAYDQQLKAGDNPYLRYNHADAEFQERLQEDTSFGGNLGRAVFQAKKRVLEPLGLVEEGAKTAPAKKRPVEPSPQRSPDSSTGIGKKGQQPARKRLNFGQTGDSESVPDPQPLGEPPAAPSSVGSGTVAAGGGAPMADNNEGADGVGNASGNWHCDSTWLGDRVITTSTRTWALPTYNNHLYKQISNSTSGGSSNDNTYFGYSTPWGYFDFNRFHCHFSPRDWQRLINNNWGFRPKKLRFKLFNIQVKEVTDNNGVKTIANNLTSTIQVFSDSEYQLPYVLGSAHQGCLPPFPADVFMIPQYGYLTLNDGSQAVGRSSFYCLEYFPSQMLRTGNNFEFSYSFEDVPFHSSYAHSQSLDRLMNPLIDQYLYYLARTINGSGQNQQTLKFSVAGPSNMAVQAKNWLPGPCFRQQRVSTTVTQNNNSEFAWPGATKYHLNGRNSLVNPGVAMASHKEGEDRFFPLSGSLIFGKQGTGRDNVDADKLMTNEEEIRPTNPVATEEYGIVATNHQSAQAQAQTGWVQNQGILPGMVWQNRDVYLQGPIWAKIPHTDGNFHPSPLMGGFGLKHPPPQILIKNTPVPANPPEVFTPAKFASFITQYSTGQVSVEIEWELQKENSKRWNPEIQYTSNFYKSNNVEFAVNTEGVYSEPRPIGTRYLTRNL

SEQ ID NO: 95 - protein, 736 aa, Adeno-Associated Virus
MAADGYLPDWLEDNLSEGIREWWDLKPGAPKPKANQQKQDNGRGLVLPGYKYLGPFNGLDKGEPVNAADAAALEHDKAYDQQLKAGDNPYLRYNHADAEFQERLQEDTSFGGNLGRAVFQAKKRVLEPLGLVEEGAKTAPAKKRPVEPSPQRSPDSSTGIGKKGQQPARKRLNFGQTGDSESVPDPQPLGEPPAAPSSVGSGTVAAGGGAPMADNNEGADGVGNASGNWHCDSTWLGDRVITTSTRTWALPTYNNHLYKQISSETAGSTNDNTYFGYSTPWGYFDFNRFHCHFSPRDWQRLINNNWGFRPKKLRFKLFNIQVKEVTTNDGVTTIANNLTSTIQVFSDSEYQLPYVLGSAHQGCLPPFPADVFMIPQYGYLTLNNGSQSVGRSSFYCLEYFPSQMLRTGNNFEFSYSFEDVPFHSSYAHSQSLDRLMNPLIDQYLYYLSKTINGSGQNQQTLKFSVAGPSNMAVQGRNYIPGPSYRQQRVSTTVTQNNNSEFAWPGASSWALNGRNSLMNPGPAMASHKEGEDRFFPLSGSLIFGKQGTGRDNVDADKVMITNEEEIKTTNPVATESYGQVATNHQSAQAQAQTGWVQNQGILPGMVWQNRDVYLQGPIWAKIPHTDGNFHPSPLMGGFGLKHPPPQILIKNTPVPANPPEVFTPAKFASFITQYSTGQVSVEIEWELQKENSKRWNPEIQYTSNFEKQTGVDFAVDSQGVYSEPRPIGTRYLTRNL

SEQ ID NO: 96 - protein, 736 aa, Adeno-Associated Virus
MAADGYLPDWLEDNLSEGIREWWDLKPGAPKPKANQQKQDDGRGLVLPGYKYLGPFNGLDKGEPVNAADAAALEHDKAYDQQLKAGDNPYLRYNHADAEFQERLQEDTSFGGNLGRAVFQAKKRVLEPLGLVEEGAKTAPGKKRPVEQSPQEPDSSSGIGKTGQQPAKKRLNFGQTGDSESVPDPQPLGEPPATPAAVGPTTMASGGGAPMADNNEGADGVGNASGNWHCDSTWLGDRVITTSTRTWALPTYNNHLYKQISNSTSGGSSNDNHYFGYSTPWGYFDFNRFHCHFSPRDWQRLINNNWGFRPKRLNFKLFNIQVKEVTDNNGVKTIANNLTSTVQVFSDSEYQLPYVLGSAHQGCLPPFPADVFMIPQYGYLTLNDGSQAVGRSSFYCLEYFPSQMLRTGNNFTFSYTFEDVPFHSSYAHSQSLDRLMNPLIDQYLYYLNRTINGSGQNQQTLKFSVAGPSNMAVQPKNWLPGPCYRQQRVSTTVTQNNNSEFAWPGASKYNLNGRESIINPGTAMASHKEGEDRFFPLSGSMIFGKQGTGRDNVDADKVMITDEEEIKATNPVATERFGTVATNHQSAQAQAQTGWVQNQGILPGMVWQDRDVYLQGPIWAKIPHTDGHFHPSPLMGGFGLKHPPPQILIKNTPVPANPPAEFSATKFASFITQYSTGQVSVEIEWELQKENSKRWNPEVQYTSNYYKSNNVEFAVNTEGLYTEPRPIGTRYLTRPL

SEQ ID NO: 97 - protein, 735 aa, Adeno-Associated Virus
MAADGYLPDWLEDNLSEGIREWWDLKPGAPKPKANQQKQDDGRGLVLPGYKYLGPFNGLDKGEPVNAADAAALEHDKAYDQQLKAGDNPYLRYNHADAEFQERLQEDTSFGGNLGRAVFQAKKRVLEPLGLVEEGAKTAPGKKRPVEQSPQEPDSSSGIGKTGQQPAKKRLNFGQTGDSESVPDPQPLGEPPATPAAVGPTTMASGGGAPMADNNEGADGVGNASGNWHCDSTWLGDRVITTSTRTWALPTYNNHLYKQISSASTGASNDNHYFGYSTPWGYFDFNRFHCHFSPRDWQRLINNNWGFRPKRLNFKLFNIQVKEVTTNDGVTTIANNLTSTVQVFSDSEYQLPYVLGSAHQGCLPPFPADVFMIPQYGYLTLNNGSQAVGRSSFYCLEYFPSQMLRTGNNFTFSYTFEDVPFHSSYAHSQSLDRLMNPLIDQYLYYLSKTINGSGQNQQTLKFSVAGPSNMAVQGRNYIPGPSYRQQRVSTTVTQNNNSEFAWPGASSWALNGRNSLMNPGPAMASHKEGEDRFFPLSGSLIFGKQGTGRDNVDADKVMITNEEEIKTTNPVATESYGQVATNHQSAQAQAQTGWVQNQGILPGMVWQDRDVYLQGPIWAKIPHTDGHFHPSPLMGGFGLKHPPPQILIKNTPVPANPPAEFSATKFASFITQYSTGQVSVEIEWELQKENSKRWNPEVQYTSNYAKSANVDFTVDNNGLYTEPRPIGTRYLTRPL

SEQ ID NO: 98 - protein, 724 aa, Adeno-Associated Virus
MSFFDWLGKQYAQGAAEFWDLKSGPPAPKKARKDGSAGFNFPGHKYLGPGNSLDRGDPVDADDAAAQKHDQSYQEQLEAGDNPYLKYNHADREFQEALKDDTSFEGNLARGLFEAKKLVAEPLGLVEPELAPPSGRKRPVQSSQESGYSSSQDKRPNLDVDEEDREFAAAAAETETGSAPPTGNLGPGTMAGGGSAPIDDGSYGADGVGNASGDWHCDSTWLDNCVITRTTRTWNLPTYNNHIYKRLSSQSGASNDNHSYFGFSTPWGYFDFNRFHCHFSPRDWQRLINNNWGLRPKSLRFKIFNIQVKEVTQNDGTTTISNNLTSTVQVFADTEYQLPYVIGSAHEGCLPPFPADVFMLPQYGYCTLNNGSQPTPRSAFYCLEYFPSKMLRTGNSFEFTYNFEKVPFHSMWAHNQSLDRLMNPLIDQYLYYLDVTNTPSGTTTQSRFTYQKGVHTNLPEQERNWLPGPGIRNQRVSKTSADNNNSEYSWQYSNKYVLENGRASKIAPGPAMASHKDDEEKFFPQSGVLIFGKQGSEKTNVDIEKVMITRETEINSTNPLAGGSLGAVSTNLQRGNRQAALDHTNVMGVFPGSVWQDRDIYLQGQIWAKIPHTDGHFHPSPLMGGFGLKNPPPQILIKNTPVPADPPTEFNANKISSFITQYSTGQVTVEMEWELQKETSKRWNPEIQYTSNYNKSVNVHFAPDDVGNYKEFRSIGTRYLTRPL

SEQ ID NO: 99 - protein, 723 aa, Adeno-Associated Virus
MSFFDWLGKQYAQGAAEFWDLKSGPPAPKKARKDGSAGFNFPGHKYLGPGNSLDRGDPVDADDAAAQKHDQSYQEQLEAGDNPYLKYNHADREFQEALKDDTSFEGNLARGLFEAKKLVAEPLGLVEPELAPPSGRKRPVQSSQESGYSSSQDKRPNLDVDEEDREFAAAAAETETGSAPPTGNLGPGTMAGGGSAPIDDGSYGADGVGNASGDWHCDSTWLDNCVITRTTRTWNLPTYNNHIYKRLSSQSGASNDNHSYFGFSTPWGYFDFNRFHCHFSPRDWQRLINNNWGLRPKSLRFKIFNIQVKEVTQNDGTTTISNNLTSTVQVFADTEYQLPYVIGSAHEGCLPPFPADVFMLPQYGYCTLNNGSQPTPRSAFYCLEYFPSKMLRTGNSFEFTYNFEDVPFHSSYAHSQSLDRLMNPLIDQYLYYLSRTNTPSGTTTQSRLQFSQAGASDIRDQSRNWLPGPCYRQQRVSKTSADNNNSEYSWTGATKYHLNGRDSLVNPGPAMASHKDDEEKFFPQSGVLIFGKQGSEKTNVDIEKVMITDEEEIRTTNPVATEQYGSVSTNLQRGNRQAATADVNTQGVFPGSVWQDRDIYLQGQIWAKIPHTDGHFHPSPLMGGFGLKNPPPQILIKNTPVPADPPTEFNANKISSFITQYSTGQVTVEMEWELQKETSKRWNPEIQYTSNYNKSVNVHFAPDDVGNYKEFRSIGTRYLTRPL

SEQ ID NO: 100 - protein, 723 aa, Adeno-Associated Virus
MSFFDWLGKQYAQGAAEFWDLKSGPPAPKKARKDGSAGFNFPGHKYLGPGNSLDRGDPVDADDAAAQKHDQSYQEQLEAGDNPYLKYNHADREFQEALKDDTSFEGNLARGLFEAKKLVAEPLGLVEPELAPPSGRKRPVQSSQESGYSSSQDKRPNLDVDEEDREFAAAAAETETGSAPPTGNLGPGTMAGGGSAPIDDGSYGADGVGNASGDWHCDSTWLDNCVITRTTRTWNLPTYNNHIYKQISNSTSGGSSNDNAYFGFSTPWGYFDFNRFHCHFSPRDWQRLINNNWGLRPKSLRFKIFNIQVKEVTDNNGVKIISNNLTSTVQVFADTEYQLPYVIGSAHEGCLPPFPADVFMLPQYGYLTLNDGSQAVGRSSFYCLEYFPSKMLRTGNSFEFTYNFEKVPFHSMWAHNQSLDRLMNPLIDQYLYYLSKTINGSGQNQQTLKFSVAGPSNMAVQGRNWLPGPGIRQQRVSTTVTQNNNSEFAWPGASSWALNGRASKIAPGPAMASHKEGEDRFFPLSGSLIFGKQGTGRDNVDADKVNITRETEINSTNPLAGGSLGQVATNHQSAQAQAQTGWVQNQGVFPGSVWQDRDIYLQGQIWAKIPHTDGHFHPSPLMGGFGLKNPPPQILIKNTPVPADPPTEFNANKISSFITQYSTGQVTVEMEWELQKETSKRWNPEIQYTSNYYKSNNVEFAVNTEGVYKEFRSIGTRYLTRPL

SEQ ID NO: 101 - protein, 723 aa, Adeno-Associated Virus
MSFFDWLGKQYAQGAAEFWDLKSGPPAPKKARKDGSAGFNFPGHKYLGPGNSLDRGDPVDADDAAAQKHDQSYQEQLEAGDNPYLKYNHADREFQEALKDDTSFEGNLARGLFEAKKLVAEPLGLVEPELAPPSGRKRPVQSSQESGYSSSQDKRPNLDVDEEDREFAAAAAETETGSAPPTGNLGPGTMAGGGSAPIDDGSYGADGVGNASGDWHCDSTWLDNCVITRTTRTWNLPTYNNHIYKRLNGTTSGDQSYFGFSTPWGYFDFNRFHCHFSPRDWQRLINNNWGLRPKSLRFKIFNIQVKEVTTQDSTKIISNNLTSTVQVFADTEYQLPYVIGSAHEGCLPPFPADVFMLPQYGYCTRQDGNSNNPTPRSAFYCLEYFPSKMLRTGNSFEFTYNFEKVPFHSMWAHNQSLDRLMNPLIDQYLYYLSKTINGSGQNQQTLKFSVAGPSNMAVQGRNYIPGPSYRQQRVSTTVTQNNNSEFAWPGASSWALNGRNSLMNPGPAMASHKEGEDRFFPLSGSLIFGKQGTGRDNVDADKVMITNEEEIKTTNPVATESYGQVATNHQSAQAQAQTGWVQNQGVFPGSVWQDRDIYLQGQIWAKIPHTDGHFHPSPLMGGFGLKNPPPQILIKNTPVPADPPTEFNANKISSFITQYSTGQVTVEMEWELQKETSKRWNPEIQYSDDSSSTSGSILHFAPDDVGNYKEFRSIGTRYLTRPL

SEQ ID NO: 102 - protein, 723 aa, Adeno-Associated Virus
MSFFDWLGKQYAQGAAEFWDLKSGPPAPKKARKDGSAGFNFPGHKYLGPGNSLDRGDPVDADDAAAQKHDQSYQEQLEAGDNPYLKYNHADREFQEALKDDTSFEGNLARGLFEAKKLVAEPLGLVEPELAPPSGRKRPVQSSQESGYSSSQDKRPNLDVDEEDREFAAAAAETETGSAPPTGNLGPGTMAGGGSAPIDDGSYGADGVGNASGDWHCDSTWLDNCVITRTTRTWNLPTYNNHIYKQISNSTSGGSSNDNAYFGFSTPWGYFDFNRFHCHFSPRDWQRLINNNWGLRPKSLRFKIFNIQVKEVTDNNGVKIISNNLTSTVQVFADTEYQLPYVIGSAHEGCLPPFPADVFMLPQYGYLTLNDGSQAVGRSSFYCLEYFPSKMLRTGNSFEFTYNFEKVPFHSMWAHNQSLDRLMNPLIDQYLYYLSKTINGSGQNQQTLKFSVAGPSNMAVQGRNYIPGPSYRQQRVSTTVTQNNNSEFAWPGASSWALNGRNSLMNPGPAMASHKEGEDRFFPLSGSLIFGKQGTGRDNVDADKVMITNEEEIKTTNPVATESYGQVATNHQSAQAQAQTGWVQNQGVFPGSVWQDRDIYLQGQIWAKIPHTDGHFHPSPLMGGFGLKNPPPQILIKNTPVPADPPTEFNANKISSFITQYSTGQVTVEMEWELQKETSKRWNPEIQYTSNYYKSNNVEFAVNTEGVYKEFRSIGTRYLTRPL

SEQ ID NO: 103 - protein, 724 aa, Adeno-Associated Virus
MSFFDWLGKQYAQGAAEFWDLKSGPPAPKKARKDGSAGFNFPGHKYLGPGNSLDRGDPVDADDAAAQKHDQSYQEQLEAGDNPYLKYNHADREFQEALKDDTSFEGNLARGLFEAKKLVAEPLGLVEPELAPPSGRKRPVQSSQESGYSSSQDKRPNLDVDEEDREFAAAAAETETGSAPPTGNLGPGTMAGGGSAPIDDGSYGADGVGNASGDWHCDSTWLDNCVITRTTRTWNLPTYNNHIYKQISNGTSGGATNDNTYFGFSTPWGYFDFNRFHCHFSPRDWQRLINNNWGLRPKSLRFKIFNIQVKEVTQNEGTKIISNNLTSTVQVFADTEYQLPYVIGSAHEGCLPPFPADVFMLPQYGYLTLNNGSQAVGRSSFYCLEYFPSKMLRTGNSFEFTYNFEKVPFHSMWAHNQSLDRLMNPLIDQYLYYLSRTQTTGGTANTQTLGFSQGGPNTMANQAKNWLPGPGIRQQRVSTTTGQNNNSNFAWTAGTKYHLNGRASKIAPGPAMATHKDDEERFFPSNGILIFGKQNAARDNADYSDVNITRETEINSTNPLAGGSLGIVADNLQQQNTAPQIGTVNSQGVFPGSVWQDRDIYLQGQIWAKIPHTDGHFHPSPLMGGFGLKNPPPQILIKNTPVPADPPTEFNANKISSFITQYSTGQVTVEMEWELQKETSKRWNPEIQYTSNYYKSTSVDFAVNTEGVYKEFRSIGTRYLTRPL

SEQ ID NO: 104 - protein, 724 aa, Adeno-Associated Virus
MSFFDWLGKQYAQGAAEFWDLKSGPPAPKKARKDGSAGFNFPGHKYLGPGNSLDRGDPVDADDAAAQKHDQSYQEQLEAGDNPYLKYNHADREFQEALKDDTSFEGNLARGLFEAKKLVAEPLGLVEPELAPPSGRKRPVQSSQESGYSSSQDKRPNLDVDEEDREFAAAAAETETGSAPPTGNLGPGTMAGGGSAPIDDGSYGADGVGNASGDWHCDSTWLDNCVITRTTRTWNLPTYNNHIYKRLNGTTSGDQSYFGFSTPWGYFDFNRFHCHFSPRDWQRLINNNWGLRPKSLRFKIFNIQVKEVTTQDSTKIISNNLTSTVQVFADTEYQLPYVIGSAHEGCLPPFPADVFMLPQYGYCTRQDGNSNNPTPRSAFYCLEYFPSKMLRTGNSFEFTYNFEKVPFHSMWAHNQSLDRLMNPLIDQYLYYLSRTQTTGGTANTQTLGFSQGGPNTMANQAKNWLPGPCYRQQRVSTTTGQNNNSNFAWTAGTKYHLNGRNSLANPGIAMATHKDDEERFFPSNGILIFGKQNAARDNADYSDVMLTSEEEIKTTNPVATEEYGIVADNLQQQNTAPQIGTVNSQGVFPGSVWQDRDIYLQGQIWAKIPHTDGHFHPSPLMGGFGLKNPPPQILIKNTPVPADPPTEFNANKISSFITQYSTGQVTVEMEWELQKETSKRWNPEIQYSDDSSSTSGSILHFAPDDVGNYKEFRSIGTRYLTRPL

SEQ ID NO: 105 - protein, 724 aa, Adeno-Associated Virus
MSFFDWLGKQYAQGAAEFWDLKSGPPAPKKARKDGSAGFNFPGHKYLGPGNSLDRGDPVDADDAAAQKHDQSYQEQLEAGDNPYLKYNHADREFQEALKDDTSFEGNLARGLFEAKKLVAEPLGLVEPELAPPSGRKRPVQSSQESGYSSSQDKRPNLDVDEEDREFAAAAAETETGSAPPTGNLGPGTMAGGGSAPIDDGSYGADGVGNASGDWHCDSTWLDNCVITRTTRTWNLPTYNNHIYKQISNGTSGGATNDNTYFGFSTPWGYFDFNRFHCHFSPRDWQRLINNNWGLRPKSLRFKIFNIQVKEVTQNEGTKIISNNLTSTVQVFADTEYQLPYVIGSAHEGCLPPFPADVFMLPQYGYLTLNNGSQAVGRSSFYCLEYFPSKMLRTGNSFEFTYNFEKVPFHSMWAHNQSLDRLMNPLIDQYLYYLSRTQTTGGTANTQTLGFSQGGPNTMANQAKNWLPGPCYRQQRVSTTTGQNNNSNFAWTAGTKYHLNGRNSLANPGIAMATHKDDEERFFPSNGILIFGKQNAARDNADYSDVMLTSEEEIKTTNPVATEEYGIVADNLQQQNTAPQIGTVNSQGVFPGSVWQDRDIYLQGQIWAKIPHTDGHFHPSPLMGGFGLKNPPPQILIKNTPVPADPPTEFNANKISSFITQYSTGQVTVEMEWELQKETSKRWNPEIQYTSNYYKSTSVDFAVNTEGVYKEFRSIGTRYLTRPL

SEQ ID NO: 106 - protein, 729 aa, Adeno-Associated Virus
MTDGYLPDWLEDNLSEGVREWWALQPGAPKPKANQQHQDNARGLVLPGYKYLGPGNGLDKGEPVNAADAAALEHDKAYDQQLKAGDNPYLKYNHADAEFQQRLQGDTSFGGNLGRAVFQAKKRVLEPLGLVEQAGETAPGKKRPLIESPQQPDSSTGIGKKGKQPAKKKLVFEDETGAGDGPPEGSTSGAMSDDSEMRAAAGGAAVEGGQGADGVGNASGDWHCDSTWSEGHVTTTSTRTWVLPTYNNHLYKQISSQSGASNDNHYFGFSTPWGYFDFNRFHCHFSPRDWQRLINNNWGMRPKAMRVKIFNIQVKEVTQNDGTTTVANNLTSTVQIFADSSYELPYVMDAGQEGSLPPFPNDVFMVPQYGYLTLNNGSQAVGRSSFYCLEYFPSQMLRTGNNFEITYSFEKVPFHSMYAHSQSLDRLMNPLIDQYLYYLSRTNTPSGTTTQSRLQFSQAGASDIRDQSRNWLPGPSIRQQRVSKTSADNNNSEYSWTGATKYHLNGRWSALTPGPPMATHKDDEEKFFPQSGVLIFGKQGSEKTNVDIEKLIFTSEEELAATNATDTDMWGSVSTNLQRGNRQAATADVNTQGAVPGMVWQNRDIYYQGPIWAKIPHTDGHFHPSPLIGGFGLKHPPPQIFIKNTPVPANPATTFSSTPVNSFITQYSTGQVSVQIDWEIQKERSKRWNPEVQFTSNYNKSVNVDFTVDTNGVYTEPRAIGTRYLTHHL

SEQ ID NO: 107 - protein, 729 aa, Adeno-Associated Virus
MTDGYLPDWLEDNLSEGVREWWALQPGAPKPKANQQHQDNARGLVLPGYKYLGPGNGLDKGEPVNAADAAALEHDKAYDQQLKAGDNPYLKYNHADAEFQQRLQGDTSFGGNLGRAVFQAKKRVLEPLGLVEQAGETAPGKKRPLIESPQQPDSSTGIGKKGKQPAKKKLVFEDETGAGDGPPEGSTSGAMSDDSEMRAAAGGAAVEGGQGADGVGNASGDWHCDSTWSEGHVTTTSTRTWVLPTYNNHLYKRLGESLQSNTYNGFSTPWGYFDFNRFHCHFSPRDWQRLINNNWGMRPKAMRVKIFNIQVKEVTTSNGETTVANNLTSTVQIFADSSYELPYVMDAGQEGSLPPFPNDVFMVPQYGYCGLVTGNTSQQQTDRNAFYCLEYFPSQMLRTGNNFEITYSFEKVPFHSMYAHSQSLDRLMNPLIDQYLYYLSRTNTPSGTTTQSRLQFSQAGASDIRDQSRNWLPGPCYRQQRVSKTSADNNNSEYSWTGATKYHLNGRDSLVNPGPAMASHKDDEEKFFPQSGVLIFGKQGSEKTNVDIEKVMITDEEEIRTTNPVATEQYGSVSTNLQRGNRQAATADVNTQGAVPGMVWQNRDIYYQGPIWAKIPHTDGHFHPSPLIGGFGLKHPPPQIFIKNTPVPANPATTFSSTPVNSFITQYSTGQVSVQIDWEIQKERSKRWNPEVQFTSNYGQQNSLLWAPDAAGKYTEPRAIGTRYLTHHL

SEQ ID NO: 108 - protein, 729 aa, Adeno-Associated Virus
MTDGYLPDWLEDNLSEGVREWWALQPGAPKPKANQQHQDNARGLVLPGYKYLGPGNGLDKGEPVNAADAAALEHDKAYDQQLKAGDNPYLKYNHADAEFQQRLQGDTSFGGNLGRAVFQAKKRVLEPLGLVEQAGETAPGKKRPLIESPQQPDSSTGIGKKGKQPAKKKLVFEDETGAGDGPPEGSTSGAMSDDSEMRAAAGGAAVEGGQGADGVGNASGDWHCDSTWSEGHVTTTSTRTWVLPTYNNHLYKQISSQSGASNDNHYFGFSTPWGYFDFNRFHCHFSPRDWQRLINNNWGMRPKAMRVKIFNIQVKEVTQNDGTTTVANNLTSTVQIFADSSYELPYVMDAGQEGSLPPFPNDVFMVPQYGYLTLNNGSQAVGRSSFYCLEYFPSQMLRTGNNFEITYSFEKVPFHSMYAHSQSLDRLMNPLIDQYLYYLSRTNTPSGTTTQSRLQFSQAGASDIRDQSRNWLPGPCYRQQRVSKTSADNNNSEYSWTGATKYHLNGRDSLVNPGPAMASHKDDEEKFFPQSGVLIFGKQGSEKTNVDIEKVMITDEEEIRTTNPVATEQYGSVSTNLQRGNRQAATADVNTQGAVPGMVWQNRDIYYQGPIWAKIPHTDGHFHPSPLIGGFGLKHPPPQIFIKNTPVPANPATTFSSTPVNSFITQYSTGQVSVQIDWEIQKERSKRWNPEVQFTSNYNKSVNVDFTVDTNGVYTEPRAIGTRYLTHHL

SEQ ID NO: 109 - protein, 731 aa, Adeno-Associated Virus
MTDGYLPDWLEDNLSEGVREWWALQPGAPKPKANQQHQDNARGLVLPGYKYLGPGNGLDKGEPVNAADAAALEHDKAYDQQLKAGDNPYLKYNHADAEFQQRLQGDTSFGGNLGRAVFQAKKRVLEPLGLVEQAGETAPGKKRPLIESPQQPDSSTGIGKKGKQPAKKKLVFEDETGAGDGPPEGSTSGAMSDDSEMRAAAGGAAVEGGQGADGVGNASGDWHCDSTWSEGHVTTTSTRTWVLPTYNNHLYKQISNGTSGGATNDNTYFGFSTPWGYFDFNRFHCHFSPRDWQRLINNNWGMRPKAMRVKIFNIQVKEVTQNEGTKTVANNLTSTVQIFADSSYELPYVMDAGQEGSLPPFPNDVFMVPQYGYLTLNNGSQAVGRSSFYCLEYFPSQMLRTGNNFEITYSFEKVPFHSMYAHSQSLDRLMNPLIDQYLYYLSRTQTTGGTANTQTLGFSQGGPNTMANQAKNWLPGPSIRQQRVSTTTGQNNNSNFAWTAGTKYHLNGRWSALTPGPPMATHKDDEERFFPSNGILIFGKQNAARDNADYSDLIFTSEEELAATNATDTDMWGIVADNLQQQNTAPQIGTVNSQGAVPGMVWQNRDIYYQGPIWAKIPHTDGHFHPSPLIGGFGLKHPPPQIFIKNTPVPANPATTFSSTPVNSFITQYSTGQVSVQIDWEIQKERSKRWNPEVQFTSNYYKSTSVDFAVNTEGVYTEPRAIGTRYLTHHL

SEQ ID NO: 110 - protein, 729 aa, Adeno-Associated Virus
MTDGYLPDWLEDNLSEGVREWWALQPGAPKPKANQQHQDNARGLVLPGYKYLGPGNGLDKGEPVNAADAAALEHDKAYDQQLKAGDNPYLKYNHADAEFQQRLQGDTSFGGNLGRAVFQAKKRVLEPLGLVEQAGETAPGKKRPLIESPQQPDSSTGIGKKGKQPAKKKLVFEDETGAGDGPPEGSTSGAMSDDSEMRAAAGGAAVEGGQGADGVGNASGDWHCDSTWSEGHVTTTSTRTWVLPTYNNHLYKRLGESLQSNTYNGFSTPWGYFDFNRFHCHFSPRDWQRLINNNWGMRPKAMRVKIFNIQVKEVTTSNGETTVANNLTSTVQIFADSSYELPYVMDAGQEGSLPPFPNDVFMVPQYGYCGLVTGNTSQQQTDRNAFYCLEYFPSQMLRTGNNFEITYSFEKVPFHSMYAHSQSLDRLMNPLIDQYLYYLSRTQTTGGTANTQTLGFSQGGPNTMANQAKNWLPGPCYRQQRVSTTTGQNNNSNFAWTAGTKYHLNGRNSLANPGIAMATHKDDEERFFPSNGILIFGKQNAARDNADYSDVMLTSEEEIKTTNPVATEEYGIVADNLQQQNTAPQIGTVNSQGAVPGMVWQNRDIYYQGPIWAKIPHTDGHFHPSPLIGGFGLKHPPPQIFIKNTPVPANPATTFSSTPVNSFITQYSTGQVSVQIDWEIQKERSKRWNPEVQFTSNYGQQNSLLWAPDAAGKYTEPRAIGTRYLTHHL

SEQ ID NO: 111 - protein, 731 aa, Adeno-Associated Virus
MTDGYLPDWLEDNLSEGVREWWALQPGAPKPKANQQHQDNARGLVLPGYKYLGPGNGLDKGEPVNAADAAALEHDKAYDQQLKAGDNPYLKYNHADAEFQQRLQGDTSFGGNLGRAVFQAKKRVLEPLGLVEQAGETAPGKKRPLIESPQQPDSSTGIGKKGKQPAKKKLVFEDETGAGDGPPEGSTSGAMSDDSEMRAAAGGAAVEGGQGADGVGNASGDWHCDSTWSEGHVTTTSTRTWVLPTYNNHLYKQISNGTSGGATNDNTYFGFSTPWGYFDFNRFHCHFSPRDWQRLINNNWGMRPKAMRVKIFNIQVKEVTQNEGTKTVANNLTSTVQIFADSSYELPYVMDAGQEGSLPPFPNDVFMVPQYGYLTLNNGSQAVGRSSFYCLEYFPSQMLRTGNNFEITYSFEKVPFHSMYAHSQSLDRLMNPLIDQYLYYLSRTQTTGGTANTQTLGFSQGGPNTMANQAKNWLPGPCYRQQRVSTTTGQNNNSNFAWTAGTKYHLNGRNSLANPGIAMATHKDDEERFFPSNGILIFGKQNAARDNADYSDVMLTSEEEIKTTNPVATEEYGIVADNLQQQNTAPQIGTVNSQGAVPGMVWQNRDIYYQGPIWAKIPHTDGHFHPSPLIGGFGLKHPPPQIFIKNTPVPANPATTFSSTPVNSFITQYSTGQVSVQIDWEIQKERSKRWNPEVQFTSNYYKSTSVDFAVNTEGVYTEPRAIGTRYLTHHL

SEQ ID NO: 112 - protein, 730 aa, Adeno-Associated Virus
MTDGYLPDWLEDNLSEGVREWWALQPGAPKPKANQQHQDNARGLVLPGYKYLGPGNGLDKGEPVNAADAAALEHDKAYDQQLKAGDNPYLKYNHADAEFQQRLQGDTSFGGNLGRAVFQAKKRVLEPLGLVEQAGETAPGKKRPLIESPQQPDSSTGIGKKGKQPAKKKLVFEDETGAGDGPPEGSTSGAMSDDSEMRAAAGGAAVEGGQGADGVGNASGDWHCDSTWSEGHVTTTSTRTWVLPTYNNHLYKQISNSTSGGSSNDNAYFGFSTPWGYFDFNRFHCHFSPRDWQRLINNNWGMRPKAMRVKIFNIQVKEVTDNNGVKTVANNLTSTVQIFADSSYELPYVMDAGQEGSLPPFPNDVFMVPQYGYLTLNDGSQAVGRSSFYCLEYFPSQMLRTGNNFEITYSFEKVPFHSMYAHSQSLDRLMNPLIDQYLYYLSKTINGSGQNQQTLKFSVAGPSNMAVQGRNWLPGPSIRQQRVSTTVTQNNNSEFAWPGASSWALNGRWSALTPGPPMATHKEGEDRFFPLSGSLIFGKQGTGRDNVDADKLIFTSEEELAATNATDTDMWGQVATNHQSAQAQAQTGWVQNQGAVPGMVWQNRDIYYQGPIWAKIPHTDGHFHPSPLIGGFGLKHPPPQIFIKNTPVPANPATTFSSTPVNSFITQYSTGQVSVQIDWEIQKERSKRWNPEVQFTSNYYKSTSVDFAVNTEGVYTEPRAIGTRYLTHHL

SEQ ID NO: 113 - protein, 728 aa, Adeno-Associated Virus
MTDGYLPDWLEDNLSEGVREWWALQPGAPKPKANQQHQDNARGLVLPGYKYLGPGNGLDKGEPVNAADAAALEHDKAYDQQLKAGDNPYLKYNHADAEFQQRLQGDTSFGGNLGRAVFQAKKRVLEPLGLVEQAGETAPGKKRPLIESPQQPDSSTGIGKKGKQPAKKKLVFEDETGAGDGPPEGSTSGAMSDDSEMRAAAGGAAVEGGQGADGVGNASGDWHCDSTWSEGHVTTTSTRTWVLPTYNNHLYKRLGESLQSNTYNGFSTPWGYFDFNRFHCHFSPRDWQRLINNNWGMRPKAMRVKIFNIQVKEVTTSNGETTVANNLTSTVQIFADSSYELPYVMDAGQEGSLPPFPNDVFMVPQYGYCGLVTGNTSQQQTDRNAFYCLEYFPSQMLRTGNNFEITYSFEKVPFHSMYAHSQSLDRLMNPLIDQYLYYLSKTINGSGQNQQTLKFSVAGPSNMAVQGRNYIPGPSYRQQRVSTTVTQNNNSEFAWPGASSWALNGRNSLMNPGPAMASHKEGEDRFFPLSGSLIFGKQGTGRDNVDADKVMITNEEEIKTTNPVATESYGQVATNHQSAQAQAQTGWVQNQGAVPGMVWQNRDIYYQGPIWAKIPHTDGHFHPSPLIGGFGLKHPPPQIFIKNTPVPANPATTFSSTPVNSFITQYSTGQVSVQIDWEIQKERSKRWNPEVQFTSNYGQQNSLLWAPDAAGKYTEPRAIGTRYLTHHL

SEQ ID NO: 114 - protein, 730 aa, Adeno-Associated Virus
MTDGYLPDWLEDNLSEGVREWWALQPGAPKPKANQQHQDNARGLVLPGYKYLGPGNGLDKGEPVNAADAAALEHDKAYDQQLKAGDNPYLKYNHADAEFQQRLQGDTSFGGNLGRAVFQAKKRVLEPLGLVEQAGETAPGKKRPLIESPQQPDSSTGIGKKGKQPAKKKLVFEDETGAGDGPPEGSTSGAMSDDSEMRAAAGGAAVEGGQGADGVGNASGDWHCDSTWSEGHVTTTSTRTWVLPTYNNHLYKQISNSTSGGSSNDNAYFGFSTPWGYFDFNRFHCHFSPRDWQRLINNNWGMRPKAMRVKIFNIQVKEVTDNNGVKTVANNLTSTVQIFADSSYELPYVMDAGQEGSLPPFPNDVFMVPQYGYLTLNDGSQAVGRSSFYCLEYFPSQMLRTGNNFEITYSFEKVPFHSMYAHSQSLDRLMNPLIDQYLYYLSKTINGSGQNQQTLKFSVAGPSNMAVQGRNYIPGPSYRQQRVSTTVTQNNNSEFAWPGASSWALNGRNSLMNPGPAMASHKEGEDRFFPLSGSLIFGKQGTGRDNVDADKVMITNEEEIKTTNPVATESYGQVATNHQSAQAQAQTGWVQNQGAVPGMVWQNRDIYYQGPIWAKIPHTDGHFHPSPLIGGFGLKHPPPQIFIKNTPVPANPATTFSSTPVNSFITQYSTGQVSVQIDWEIQKERSKRWNPEVQFTSNYYKSNNVEFAVNTEGVYTEPRAIGTRYLTHHL

SEQ ID NO: 115 - protein, 730 aa, Adeno-Associated Virus
MSFVDHPPDWLESIGDGFREFLGLEAGPPKPKANQQKQDNARGLVLPGYKYLGPGNGLDKGDPVNFADEVAREHDLSYQKQLEAGDNPYLKYNHADAEFQEKLASDTSFGGNLGKAVFQAKKRILEPLGLVETPDKTAPAAKKRPLEQSPQEPDSSSGVGKKGKQPARKRLNFDDEPGAGDGPPPEGPSSGAMSTETEMRAAAGGNGGDAGQGAEGVGNASGDWHCDSTWSESHVTTTSTRTWVLPTYNNHLYLQISNSTSGGSSNDNAYFGFSTPWGYFDFNRFHCHFSPRDWQRLINNHWGLRPKSMQVRIFNIQVKEVTDNNGVKSNNLTSTVQIFADSTYELPYVMDAGQEGSLPPFPNDVFMVPQYGYLTLNDGSQAVGRSSFYCLEYFPSQMLRTGNNFEMVYKFENVPFHSMYAHSQSLDRLMNPLLDQYLYYLSKTINGSGQNQQTLKFSVAGPSNMAVQGRNWLPGPMMRQQRVSTTVTQNNNSEFAWPGASSWALNGRWSNFAPGTAMATHKEGEDRFFPLSGSLIFGKQGTGRDNVDADKLMFTSEDELRATNPRDTDLFGQVATNHQSAQAQAQTGWVQNQGVYPGMVWQDRDIYYQGPIWAKIPHTDGHFHPSPLIGGFGLKSPPPQIFIKNTPVPANPATTFSPARINSFITQYSTGQVAVKIEWEIQKERSKRWNPEVQFTSNYYKSNNVEFAVNTEGVYKEPRAIGSRYLTNHL

SEQ ID NO: 116 - protein, 730 aa, Adeno-Associated Virus
MSFVDHPPDWLESIGDGFREFLGLEAGPPKPKANQQKQDNARGLVLPGYKYLGPGNGLDKGDPVNFADEVAREHDLSYQKQLEAGDNPYLKYNHADAEFQEKLASDTSFGGNLGKAVFQAKKRILEPLGLVETPDKTAPAAKKRPLEQSPQEPDSSSGVGKKGKQPARKRLNFDDEPGAGDGPPPEGPSSGAMSTETEMRAAAGGNGGDAGQGAEGVGNASGDWHCDSTWSESHVTTTSTRTWVLPTYNNHLYLRLGSSNASDTFNGFSTPWGYFDFNRFHCHFSPRDWQRLINNHWGLRPKSMQVRIFNIQVKEVTTSNGETTVSNNLTSTVQIFADSTYELPYVMDAGQEGSLPPFPNDVFMVPQYGYCGLVTGGSSQNQTDRNAFYCLEYFPSQMLRTGNNFEMVYKFENVPFHSMYAHSQSLDRLMNPLLDQYLYYLSKTINGSGQNQQTLKFSVAGPSNMAVQGRNYIPGPSYRQQRVSTTVTQNNNSEFAWPGASSWALNGRNSLMNPGPAMASHKEGEDRFFPLSGSLIFGKQGTGRDNVDADKVMITNEEEIKTTNPVATESYGQVATNHQSAQAQAQTGWVQNQGVYPGMVWQDRDIYYQGPIWAKIPHTDGHFHPSPLIGGFGLKSPPPQIFIKNTPVPANPATTFSPARINSFITQYSTGQVAVKIEWEIQKERSKRWNPEVQFTSNYGAQDSLLWAPDNAGAYKEPRAIGSRYLTNHL

SEQ ID NO: 117 - protein, 730 aa, Adeno-Associated Virus
MSFVDHPPDWLESIGDGFREFLGLEAGPPKPKANQQKQDNARGLVLPGYKYLGPGNGLDKGDPVNFADEVAREHDLSYQKQLEAGDNPYLKYNHADAEFQEKLASDTSFGGNLGKAVFQAKKRILEPLGLVETPDKTAPAAKKRPLEQSPQEPDSSSGVGKKGKQPARKRLNFDDEPGAGDGPPPEGPSSGAMSTETEMRAAAGGNGGDAGQGAEGVGNASGDWHCDSTWSESHVTTTSTRTWVLPTYNNHLYLQISNSTSGGSSNDNAYFGFSTPWGYFDFNRFHCHFSPRDWQRLINNHWGLRPKSMQVRIFNIQVKEVTDNNGVKSNNLTSTVQIFADSTYELPYVMDAGQEGSLPPFPNDVFMVPQYGYLTLNDGSQAVGRSSFYCLEYFPSQMLRTGNNFEMVYKFENVPFHSMYAHSQSLDRLMNPLLDQYLYYLSKTINGSGQNQQTLKFSVAGPSNMAVQGRNYIPGPSYRQQRVSTTVTQNNNSEFAWPGASSWALNGRNSLMNPGPAMASHKEGEDRFFPLSGSLIFGKQGTGRDNVDADKVMITNEEEIKTTNPVATESYGQVATNHQSAQAQAQTGWVQNQGVYPGMVWQDRDIYYQGPIWAKIPHTDGHFHPSPLIGGFGLKSPPPQIFIKNTPVPANPATTFSPARINSFITQYSTGQVAVKIEWEIQKERSKRWNPEVQFTSNYYKSNNVEFAVNTEGVYKEPRAIGSRYLTNHL

SEQ ID NO: 118 - protein, 731 aa, Adeno-Associated Virus
MSFVDHPPDWLESIGDGFREFLGLEAGPPKPKANQQKQDNARGLVLPGYKYLGPGNGLDKGDPVNFADEVAREHDLSYQKQLEAGDNPYLKYNHADAEFQEKLASDTSFGGNLGKAVFQAKKRILEPLGLVETPDKTAPAAKKRPLEQSPQEPDSSSGVGKKGKQPARKRLNFDDEPGAGDGPPPEGPSSGAMSTETEMRAAAGGNGGDAGQGAEGVGNASGDWHCDSTWSESHVTTTSTRTWVLPTYNNHLYLQISNGTSGGATNDNTYFGFSTPWGYFDFNRFHCHFSPRDWQRLINNHWGLRPKSMQVRIFNIQVKEVTQNEGTKSNNLTSTVQIFADSTYELPYVMDAGQEGSLPPFPNDVFMVPQYGYLTLNNGSQAVGRSSFYCLEYFPSQMLRTGNNFEMVYKFENVPFHSMYAHSQSLDRLMNPLLDQYLYYLSRTQTTGGTANTQTLGFSQGGPNTMANQAKNWLPGPMMRQQRVSTTTGQNNNSNFAWTAGTKYHLNGRWSNFAPGTAMATHKDDEERFFPSNGILIFGKQNAARDNADYSDLMFTSEDELRATNPRDTDLFGIVADNLQQQNTAPQIGTVNSQGVYPGMVWQDRDIYYQGPIWAKIPHTDGHFHPSPLIGGFGLKSPPPQIFIKNTPVPANPATTFSPARINSFITQYSTGQVAVKIEWEIQKERSKRWNPEVQFTSNYYKSTSVDFAVNTEGVYKEPRAIGSRYLTNHL

SEQ ID NO: 119 - protein, 731 aa, Adeno-Associated Virus
MSFVDHPPDWLESIGDGFREFLGLEAGPPKPKANQQKQDNARGLVLPGYKYLGPGNGLDKGDPVNFADEVAREHDLSYQKQLEAGDNPYLKYNHADAEFQEKLASDTSFGGNLGKAVFQAKKRILEPLGLVETPDKTAPAAKKRPLEQSPQEPDSSSGVGKKGKQPARKRLNFDDEPGAGDGPPPEGPSSGAMSTETEMRAAAGGNGGDAGQGAEGVGNASGDWHCDSTWSESHVTTTSTRTWVLPTYNNHLYLRLGSSNASDTFNGFSTPWGYFDFNRFHCHFSPRDWQRLINNHWGLRPKSMQVRIFNIQVKEVTTSNGETTVSNNLTSTVQIFADSTYELPYVMDAGQEGSLPPFPNDVFMVPQYGYCGLVTGGSSQNQTDRNAFYCLEYFPSQMLRTGNNFEMVYKFENVPFHSMYAHSQSLDRLMNPLLDQYLYYLSRTQTTGGTANTQTLGFSQGGPNTMANQAKNWLPGPCYRQQRVSTTTGQNNNSNFAWTAGTKYHLNGRNSLANPGIAMATHKDDEERFFPSNGILIFGKQNAARDNADYSDVMLTSEEEIKTTNPVATEEYGIVADNLQQQNTAPQIGTVNSQGVYPGMVWQDRDIYYQGPIWAKIPHTDGHFHPSPLIGGFGLKSPPPQIFIKNTPVPANPATTFSPARINSFITQYSTGQVAVKIEWEIQKERSKRWNPEVQFTSNYGAQDSLLWAPDNAGAYKEPRAIGSRYLTNHL

SEQ ID NO: 120 - protein, 731 aa, Adeno-Associated Virus
MSFVDHPPDWLESIGDGFREFLGLEAGPPKPKANQQKQDNARGLVLPGYKYLGPGNGLDKGDPVNFADEVAREHDLSYQKQLEAGDNPYLKYNHADAEFQEKLASDTSFGGNLGKAVFQAKKRILEPLGLVETPDKTAPAAKKRPLEQSPQEPDSSSGVGKKGKQPARKRLNFDDEPGAGDGPPPEGPSSGAMSTETEMRAAAGGNGGDAGQGAEGVGNASGDWHCDSTWSESHVTTTSTRTWVLPTYNNHLYLQISNGTSGGATNDNTYFGFSTPWGYFDFNRFHCHFSPRDWQRLINNHWGLRPKSMQVRIFNIQVKEVTQNEGTKSNNLTSTVQIFADSTYELPYVMDAGQEGSLPPFPNDVFMVPQYGYLTLNNGSQAVGRSSFYCLEYFPSQMLRTGNNFEMVYKFENVPFHSMYAHSQSLDRLMNPLLDQYLYYLSRTQTTGGTANTQTLGFSQGGPNTMANQAKNWLPGPCYRQQRVSTTTGQNNNSNFAWTAGTKYHLNGRNSLANPGIAMATHKDDEERFFPSNGILIFGKQNAARDNADYSDVMLTSEEEIKTTNPVATEEYGIVADNLQQQNTAPQIGTVNSQGVYPGMVWQDRDIYYQGPIWAKIPHTDGHFHPSPLIGGFGLKSPPPQIFIKNTPVPANPATTFSPARINSFITQYSTGQVAVKIEWEIQKERSKRWNPEVQFTSNYYKSTSVDFAVNTEGVYKEPRAIGSRYLTNHL

SEQ ID NO: 121 - protein, 737 aa, Adeno-Associated Virus
MAADGYLPDWLEDNLSEGIREWWALKPGAPKPKANQQKQDDGRGLVLPGYKYLGPFNGLDKGEPVNAADAAALEHDKAYDQQLQAGDNPYLRYNHADAEFQERLQEDTSFGGNLGRAVFQAKKRVLEPLGLVEEGAKTAPGKKRPVEPSPQRSPDSSTGIGKKGQQPARKRLNFGQTGDSESVPDPQPLGEPPAAPSGVGPNTMAAGGGAPMADNNEGADGVGSSSGNWHCDSTWLGDRVITTSTRTWALPTYNNHLYKQISNSTSGGSSNDNTYFGYSTPWGYFDFNRFHCHFSPRDWQRLINNNWGFRPKRLSFKLFNIQVKEVTDNNGVKTIANNLTSTIQVFTDSEYQLPYVLGSAHQGCLPPFPADVFMIPQYGYLTLNDGSQAVGRSSFYCLEYFPSQMLRTGNNFQFTYTFEDVPFHSSYAHSQSLDRLMNPLIDQYLYYLSRTINGSGQNQQTLGFSVAGPSNMAVQGRNWLPGPCYRQQRVSTTVTQNNNSEFAWPGGTKYHLNGRNSLANPGIAMATHKEGEDRFFPLSGILIFGKQGTGRDNVDADKVMLTSEEEIKTTNPVATEEYGIVATNHQSAQAQAQTGTVNSQGALPGMVWQNRDVYLQGPIWAKIPHTDGNFHPSPLMGGFGLKHPPPQILIKNTPVPADPPTTFNQSKLNSFITQYSTGQVSVEIEWELQKENSKRWNPEIQYTSNYYKSNNVEFAVNTEGVYSEPRPIGTRYLTRNL

SEQ ID NO: 122 - protein, 737 aa, Adeno-Associated Virus
MAADGYLPDWLEDNLSEGIREWWALKPGAPKPKANQQKQDDGRGLVLPGYKYLGPFNGLDKGEPVNAADAAALEHDKAYDQQLQAGDNPYLRYNHADAEFQERLQEDTSFGGNLGRAVFQAKKRVLEPLGLVEEGAKTAPGKKRPVEPSPQRSPDSSTGIGKKGQQPARKRLNFGQTGDSESVPDPQPLGEPPAAPSGVGPNTMAAGGGAPMADNNEGADGVGSSSGNWHCDSTWLGDRVITTSTRTWALPTYNNHLYKQISNSTSGGSSNDNTYFGYSTPWGYFDFNRFHCHFSPRDWQRLINNNWGFRPKRLSFKLFNIQVKEVTDNNGVKTIANNLTSTIQVFTDSEYQLPYVLGSAHQGCLPPFPADVFMIPQYGYLTLNDGSQAVGRSSFYCLEYFPSQMLRTGNNFQFTYTFEDVPFHSSYAHSQSLDRLMNPLIDQYLYYLSKTINGSGQNQQTLKFSVAGPSNMAVQGRNYIPGPSYRQQRVSTTVTQNNNSEFAWPGASSWALNGRNSLMNPGPAMASHKEGEDRFFPLSGSLIFGKQGTGRDNVDADKVMITNEEEIKTTNPVATESYGQVATNHQSAQAQAQTGWVQNQGILPGMVWQNRDVYLQGPIWAKIPHTDGNFHPSPLMGGFGLKHPPPQILIKNTPVPADPPTTFNQSKLNSFITQYSTGQVSVEIEWELQKENSKRWNPEIQYTSNYYKSNNVEFAVNTEGVYSEPRPIGTRYLTRNL

SEQ ID NO: 123 - protein, 743 aa, Adeno-Associated Virus
MAADGYLPDWLEDNLSEGIREWWDLKPGAPKPKANQQKQDDGRGLVLPGYKYLGPFNGLDKGEPVNAADAAALEHDKAYDQQLKAGDNPYLRYNHADAEFQERLQEDTSFGGNLGRAVFQAKKRVLEPLGLVEEGAKTAPGKKRPVEQSPQEPDSSSGIGKTGQQPAKKRLNFGQTGDSESVPDPQPLGEPPAAPSGVGSNTMASGGGAPMADNNEGADGVGNSSGNWHCDSTWLGDRVITTSTRTWALPTYNNHLYKQISNSTSGGSSNDNTYFGYSTPWGYFDFNRFHCHFSPRDWQRLINNNWGFRPKRLNFKLFNIQVKEVTDNNGVKTIANNLTSTVQVFTDSEYQLPYVLGSAHQGCLPPFPADVFMIPQYGYLTLNDGSQAVGRSSFYCLEYFPSQMLRTGNNFQFSYTFEDVPFHSSYAHSQSLDRLMNPLIDQYLYFLSRTINGSGQNQQTLQFSQAGPSSMANQARNWVPGPCYRQQRVSTTVTQNNNSEFAWPGATKYHLNGRDSLMNPGVAMASHKEGEDRFFPLSGVLIFGKQGTGRDNVDADKVMITNEEEIKTTNPVATEEYGAVATNHQSAQTLAVPFKAQAQTGLVHNQGVLPGMVWQNRDVYLQGPIWAKIPHTDGNFHPSPLMGGFGLKHPPPQILIKNTPVPADPPTTFNQAKLNSFITQYSTGQVSVEIEWELQKENSKRWNPEIQYTSNYYKSNNVEFAVNTEGVYSEPRPIGTRFLTRNL

SEQ ID NO: 124 - protein, 736 aa, Adeno-Associated Virus
MAADGYLPDWLEDNLSEGIREWWDLKPGAPKPKANQQKQDDGRGLVLPGYKYLGPFNGLDKGEPVNAADAAALEHDKAYDQQLKAGDNPYLRYNHADAEFQERLQEDTSFGGNLGRAVFQAKKRVLEPLGLVEEGAKTAPGKKRPVEQSPQEPDSSSGIGKTGQQPAKKRLNFGQTGDSESVPDPQPLGEPPAAPSGVGSNTMASGGGAPMADNNEGADGVGNSSGNWHCDSTWLGDRVITTSTRTWALPTYNNHLYKQISNSTSGGSSNDNTYFGYSTPWGYFDFNRFHCHFSPRDWQRLINNNWGFRPKRLNFKLFNIQVKEVTDNNGVKTIANNLTSTVQVFTDSEYQLPYVLGSAHQGCLPPFPADVFMIPQYGYLTLNDGSQAVGRSSFYCLEYFPSQMLRTGNNFQFSYTFEDVPFHSSYAHSQSLDRLMNPLIDQYLYFLSRTINGSGQNQQTLQFSQAGPSSMANQARNWVPGPCYRQQRVSTTVTQNNNSEFAWPGATKYHLNGRDSLMNPGVAMASHKEGEDRFFPLSGVLIFGKQGTGRDNVDADKVMITNEEEIKTTNPVATEEYGAVATNHQSAQAQAQTGLVHNQGVLPGMVWQNRDVYLQGPIWAKIPHTDGNFHPSPLMGGFGLKHPPPQILIKNTPVPADPPTTFNQAKLNSFITQYSTGQVSVEIEWELQKENSKRWNPEIQYTSNYYKSNNVEFAVNTEGVYSEPRPIGTRFLTRNL

SEQ ID NO: 125 - protein, 743 aa, Adeno-Associated Virus
MAADGYLPDWLEDNLSEGIREWWDLKPGAPKPKANQQKQDDGRGLVLPGYKYLGPFNGLDKGEPVNAADAAALEHDKAYDQQLKAGDNPYLRYNHADAEFQERLQEDTSFGGNLGRAVFQAKKRVLEPLGLVEEGAKTAPGKKRPVEQSPQEPDSSSGIGKTGQQPAKKRLNFGQTGDSESVPDPQPLGEPPAAPSGVGSNTMASGGGAPMADNNEGADGVGNSSGNWHCDSTWLGDRVITTSTRTWALPTYNNHLYKQISNGTSGGSTNDNTYFGYSTPWGYFDFNRFHCHFSPRDWQRLINNNWGFRPKRLNFKLFNIQVKEVTTNEGTKTIANNLTSTVQVFTDSEYQLPYVLGSAHQGCLPPFPADVFMIPQYGYLTLNNGSQAVGRSSFYCLEYFPSQMLRTGNNFQFSYTFEDVPFHSSYAHSQSLDRLMNPLIDQYLYFLSRTINGSGQNQQTLKFSVAGPSNMAVQGRNYIPGPSYRQQRVSTTVTQNNNSEFAWPGASSWALNGRNSLMNPGPAMASHKEGEDRFFPLSGSLIFGKQGTGRDNVDADKVMITNEEEIKTTNPVATESYGQVATNHQSAQTLAVPFKAQAQTGWVQNQGVLPGMVWQNRDVYLQGPIWAKIPHTDGNFHPSPLMGGFGLKHPPPQILIKNTPVPADPPTTFNQAKLNSFITQYSTGQVSVEIEWELQKENSKRWNPEIQYTSNYYKSTNVDFAVNTEGVYSEPRPIGTRFLTRNL

SEQ ID NO: 126 - protein, 736 aa, Adeno-Associated Virus
MAADGYLPDWLEDNLSEGIREWWDLKPGAPKPKANQQKQDDGRGLVLPGYKYLGPFNGLDKGEPVNAADAAALEHDKAYDQQLKAGDNPYLRYNHADAEFQERLQEDTSFGGNLGRAVFQAKKRVLEPLGLVEEGAKTAPGKKRPVEQSPQEPDSSSGIGKTGQQPAKKRLNFGQTGDSESVPDPQPLGEPPAAPSGVGSNTMASGGGAPMADNNEGADGVGNSSGNWHCDSTWLGDRVITTSTRTWALPTYNNHLYKQISNGTSGGSTNDNTYFGYSTPWGYFDFNRFHCHFSPRDWQRLINNNWGFRPKRLNFKLFNIQVKEVTTNEGTKTIANNLTSTVQVFTDSEYQLPYVLGSAHQGCLPPFPADVFMIPQYGYLTLNNGSQAVGRSSFYCLEYFPSQMLRTGNNFQFSYTFEDVPFHSSYAHSQSLDRLMNPLIDQYLYFLSRTINGSGQNQQTLKFSVAGPSNMAVQGRNYIPGPSYRQQRVSTTVTQNNNSEFAWPGASSWALNGRNSLMNPGPAMASHKEGEDRFFPLSGSLIFGKQGTGRDNVDADKVMITNEEEIKTTNPVATESYGQVATNHQSAQAQAQTGWVQNQGVLPGMVWQNRDVYLQGPIWAKIPHTDGNFHPSPLMGGFGLKHPPPQILIKNTPVPADPPTTFNQAKLNSFITQYSTGQVSVEIEWELQKENSKRWNPEIQYTSNYYKSTNVDFAVNTEGVYSEPRPIGTRFLTRNL

SEQ ID NO: 127 - protein, 736 aa, Adeno-Associated Virus
MAADGYLPDWLEDNLSEGIREWWDLKPGAPKPKANQQKQDDGRGLVLPGYKYLGPFNGLDKGEPVNAADAAALEHDKAYDQQLKAGDNPYLRYNHADAEFQERLQEDTSFGGNLGRAVFQAKKRVLEPLGLVEEGAKTAPGKKRPVEQSPQEPDSSSGIGKTGQQPAKKRLNFGQTGDSESVPDPQPLGEPPAAPSGVGSNTMASGGGAPMADNNEGADGVGNSSGNWHCDSTWLGDRVITTSTRTWALPTYNNHLYKQISNSTSGGSSNDNTYFGYSTPWGYFDFNRFHCHFSPRDWQRLINNNWGFRPKRLNFKLFNIQVKEVTDNNGVKTIANNLTSTVQVFTDSEYQLPYVLGSAHQGCLPPFPADVFMIPQYGYLTLNDGSQAVGRSSFYCLEYFPSQMLRTGNNFQFSYTFEDVPFHSSYAHSQSLDRLMNPLIDQYLYFLSRTINGSGQNQQTLQFSVAGPSNMAVQARNWVPGPCYRQQRVSTTVTQNNNSEFAWPGATKYHLNGRDSLMNPGVAMASHKEGEDRFFPLSGVLIFGKQGTGRDNVDADKVMITNEEEIKTTNPVATEEYGAVATNHQSAQAQAQTGLVHNQGVLPGMVWQNRDVYLQGPIWAKIPHTDGNFHPSPLMGGFGLKHPPPQILIKNTPVPADPPTTFNQAKLNSFITQYSTGQVSVEIEWELQKENSKRWNPEIQYTSNYYKSNNVEFAVNTEGVYSEPRPIGTRFLTRNL

SEQ ID NO: 128 - protein, 737 aa, Adeno-Associated Virus
MAADGYLPDWLEDNLSEGIREWWDLKPGAPKPKANQQKQDDGRGLVLPGYKYLGPFNGLDKGEPVNAADAAALEHDKAYDQQLKAGDNPYLRYNHADAEFQERLQEDTSFGGNLGRAVFQAKKRVLEPLGLVEEGAKTAPGKKRPVEQSPQEPDSSSGIGKTGQQPAKKRLNFGQTGDSESVPDPQPLGEPPAAPSGVGSNTMASGGGAPMADNNEGADGVGNSSGNWHCDSTWLGDRVITTSTRTWALPTYNNHLYKQISNGTSGGSTNDNTYFGYSTPWGYFDFNRFHCHFSPRDWQRLINNNWGFRPKRLNFKLFNIQVKEVTTNEGTKTIANNLTSTVQVFTDSEYQLPYVLGSAHQGCLPPFPADVFMIPQYGYLTLNNGSQAVGRSSFYCLEYFPSQMLRTGNNFQFSYTFEDVPFHSSYAHSQSLDRLMNPLIDQYLYFLSRTQTTGGTANTQTLGFSQGGPNTMANQAKNWLPGPCYRQQRVSTTTGQNNNSNFAWTAGTKYHLNGRNSLANPGIAMATHKDDEERFFPSNGILIFGKQNAARDNADYSDVMLTSEEEIKTTNPVATEEYGIVADNLQQQNTAPQIGTVNSQGVLPGMVWQNRDVYLQGPIWAKIPHTDGNFHPSPLMGGFGLKHPPPQILIKNTPVPADPPTTFNQAKLNSFITQYSTGQVSVEIEWELQKENSKRWNPEIQYTSNYYKSTNVDFAVNTEGVYSEPRPIGTRFLTRNL

SEQ ID NO: 129 - protein, 736 aa, Adeno-Associated Virus
MAADGYLPDWLEDNLSEGIREWWALKPGAPQPKANQQHQDNARGLVLPGYKYLGPGNGLDKGEPVNAADAAALEHDKAYDQQLKAGDNPYLKYNHADAEFQERLKEDTSFGGNLGRAVFQAKKRLLEPLGLVEEAAKTAPGKKRPVEQSPQEPDSSAGIGKSGAQPAKKRLNFGQTGDTESVPDPQPIGEPPAAPSGVGSLTMASGGGAPVADNNEGADGVGSSSGNWHCDSQWLGDRVITTSTRTWALPTYNNHLYKQISNGTSGGSTNDNAYFGYSTPWGYFDFNRFHCHFSPRDWQRLINNNWGFRPKRLNFKLFNIQVKEVTTNEGTKTIANNLTSTVQVFTDSDYQLPYVLGSAHEGCLPPFPADVFMIPQYGYLTLNNGSQAVGRSSFYCLEYFPSQMLRTGNNFQFSYEFENVPFHSSYAHSQSLDRLMNPLIDQYLYFLSRTQTTGTAGTQTLKFSVAGPSNMAVQGRNYIPGPSYRQQRVSTTTNQNNNSNFAWTGASSWALNGRNSLMNPGPAMASHKDDEDRFFPSSGSLIFGKQGAGNDNVDYSQVMITNEEEIKTTNPVATESYGQVATNNQSANTQAQTGWVQNQGILPGMVWQDRDVYLQGPIWAKIPHTDGNFHPSPLMGGFGMKHPPPQILIKNTPVPADPPTAFNKDKLNSFITQYSTGQVSVEIEWELQKENSKRWNPEIQYTSNYYKSTNVDFAVNTEGVYSEPRPIGTRFLTRNL

SEQ ID NO: 130 - protein, 736 aa, Adeno-Associated Virus
MAADGYLPDWLEDNLSEGIREWWALKPGAPQPKANQQHQDNARGLVLPGYKYLGPGNGLDKGEPVNAADAAALEHDKAYDQQLKAGDNPYLKYNHADAEFQERLKEDTSFGGNLGRAVFQAKKRLLEPLGLVEEAAKTAPGKKRPVEQSPQEPDSSAGIGKSGAQPAKKRLNFGQTGDTESVPDPQPIGEPPAAPSGVGSLTMASGGGAPVADNNEGADGVGSSSGNWHCDSQWLGDRVITTSTRTWALPTYNNHLYKQISNSTSGGSSNDNAYFGYSTPWGYFDFNRFHCHFSPRDWQRLINNNWGFRPKRLNFKLFNIQVKEVTDNNGVKTIANNLTSTVQVFTDSDYQLPYVLGSAHEGCLPPFPADVFMIPQYGYLTLNDGSQAVGRSSFYCLEYFPSQMLRTGNNFQFSYEFENVPFHSSYAHSQSLDRLMNPLIDQYLYFLSRTQTTGTAGTQTLQFSQAGPSSMANQARNWVPGPCYRQQRVSTTTNQNNNSNFAWTGATKYHLNGRDSLMNPGVAMASHKDDEDRFFPSSGVLIFGKQGAGNDNVDYSQVMITNEEEIKTTNPVATEEYGAVATNNQSANTQAQTGLVHNQGILPGMVWQDRDVYLQGPIWAKIPHTDGNFHPSPLMGGFGMKHPPPQILIKNTPVPADPPTAFNKDKLNSFITQYSTGQVSVEIEWELQKENSKRWNPEIQYTSNYYKSNNVEFAVNTEGVYSEPRPIGTRFLTRNL

SEQ ID NO: 131 - protein, 737 aa, Adeno-Associated Virus
MAADGYLPDWLEDNLSEGIREWWALKPGAPKPKANQQKQDDGRGLVLPGYKYLGPFNGLDKGEPVNAADAAALEHDKAYDQQLQAGDNPYLRYNHADAEFQERLQEDTSFGGNLGRAVFQAKKRVLEPLGLVEEGAKTAPGKKRPVEPSPQRSPDSSTGIGKKGQQPARKRLNFGQTGDSESVPDPQPLGEPPAAPSGVGPNTMAAGGGAPMADNNEGADGVGSSSGNWHCDSTWLGDRVITTSTRTWALPTYNNHLYKQISNGTSGGSTNDNTYFGYSTPWGYFDFNRFHCHFSPRDWQRLINNNWGFRPKRLSFKLFNIQVKEVTTNEGTKTIANNLTSTIQVFTDSEYQLPYVLGSAHQGCLPPFPADVFMIPQYGYLTLNNGSQAVGRSSFYCLEYFPSQMLRTGNNFQFTYTFEDVPFHSSYAHSQSLDRLMNPLIDQYLYFLSRTQTTGTAGTQTLGFSQGGPNTMANQAKNWLPGPCYRQQRVSTTTNQNNNSNFAWTGGTKYHLNGRNSLANPGIAMATHKDDEDRFFPSSGILIFGKQGAGNDNVDYSQVMLTSEEEIKTTNPVATEEYGIVATNNQSANTQAQTGTVNSQGALPGMVWQNRDVYLQGPIWAKIPHTDGNFHPSPLMGGFGLKHPPPQILIKNTPVPADPPTTFNQSKLNSFITQYSTGQVSVEIEWELQKENSKRWNPEIQYTSNYYKSTNVDFAVNTEGVYSEPRPIGTRFLTRNL

SEQ ID NO: 132 - protein, 737 aa, Adeno-Associated Virus
MAADGYLPDWLEDNLSEGIREWWALKPGAPKPKANQQKQDDGRGLVLPGYKYLGPFNGLDKGEPVNAADAAALEHDKAYDQQLQAGDNPYLRYNHADAEFQERLQEDTSFGGNLGRAVFQAKKRVLEPLGLVEEGAKTAPGKKRPVEPSPQRSPDSSTGIGKKGQQPARKRLNFGQTGDSESVPDPQPLGEPPAAPSGVGPNTMAAGGGAPMADNNEGADGVGSSSGNWHCDSTWLGDRVITTSTRTWALPTYNNHLYKQISNGTSGGATNDNTYFGYSTPWGYFDFNRFHCHFSPRDWQRLINNNWGFRPKRLSFKLFNIQVKEVTQNEGTKTIANNLTSTIQVFTDSEYQLPYVLGSAHQGCLPPFPADVFMIPQYGYLTLNNGSQAVGRSSFYCLEYFPSQMLRTGNNFQFTYTFEDVPFHSSYAHSQSLDRLMNPLIDQYLYFLSRTQTTGTAGTQTLQFSQAGPSSMANQARNWVPGPCYRQQRVSTTTNQNNNSNFAWTGATKYHLNGRDSLMNPGVAMASHKDDEDRFFPSSGVLIFGKQGAGNDNVDYSQVMITNEEEIKTTNPVATEEYGAVATNNQSANTQAQTGLVHNQGALPGMVWQNRDVYLQGPIWAKIPHTDGNFHPSPLMGGFGLKHPPPQILIKNTPVPADPPTTFNQSKLNSFITQYSTGQVSVEIEWELQKENSKRWNPEIQYTSNYYKSTSVDFAVNTEGVYSEPRPIGTRFLTRNL

SEQ ID NO: 133 - protein, 737 aa, Adeno-Associated Virus
MAADGYLPDWLEDNLSEGIREWWDLKPGAPKPKANQQKQDDGRGLVLPGYKYLGPFNGLDKGEPVNAADAAALEHDKAYDQQLKAGDNPYLRYNHADAEFQERLQEDTSFGGNLGRAVFQAKKRVLEPLGLVEEGAKTAPGKKRPVEQSPQEPDSSSGIGKTGQQPAKKRLNFGQTGDSESVPDPQPLGEPPAAPSGVGSNTMASGGGAPMADNNEGADGVGNSSGNWHCDSTWLGDRVITTSTRTWALPTYNNHLYKQISNGTSGGATNDNTYFGYSTPWGYFDFNRFHCHFSPRDWQRLINNNWGFRPKRLNFKLFNIQVKEVTQNEGTKTIANNLTSTVQVFTDSEYQLPYVLGSAHQGCLPPFPADVFMIPQYGYLTLNNGSQAVGRSSFYCLEYFPSQMLRTGNNFQFSYTFEDVPFHSSYAHSQSLDRLMNPLIDQYLYFLSRTQTTGGTANTQTLQFSQAGPSSMANQARNWVPGPCYRQQRVSTTTGQNNNSNFAWTAATKYHLNGRDSLMNPGVAMASHKDDEERFFPSNGVLIFGKQNAARDNADYSDVMITNEEEIKTTNPVATEEYGAVADNLQQQNTAPQIGLVHNQGVLPGMVWQNRDVYLQGPIWAKIPHTDGNFHPSPLMGGFGLKHPPPQILIKNTPVPADPPTTFNQAKLNSFITQYSTGQVSVEIEWELQKENSKRWNPEIQYTSNYYKSTSVDFAVNTEGVYSEPRPIGTRFLTRNL

SEQ ID NO: 134 - protein, 737 aa, Adeno-Associated Virus
MAADGYLPDWLEDNLSEGIREWWALKPGAPKPKANQQKQDDGRGLVLPGYKYLGPFNGLDKGEPVNAADAAALEHDKAYDQQLQAGDNPYLRYNHADAEFQERLQEDTSFGGNLGRAVFQAKKRVLEPLGLVEEGAKTAPGKKRPVEPSPQRSPDSSTGIGKKGQQPARKRLNFGQTGDSESVPDPQPLGEPPAAPSGVGPNTMAAGGGAPMADNNEGADGVGSSSGNWHCDSTWLGDRVITTSTRTWALPTYNNHLYKQISSASTGASNDNTYFGYSTPWGYFDFNRFHCHFSPRDWQRLINNNWGFRPKRLSFKLFNIQVKEVTTNDGVTTIANNLTSTIQVFTDSEYQLPYVLGSAHQGCLPPFPADVFMIPQYGYLTLNNGSQAVGRSSFYCLEYFPSQMLRTGNNFQFTYTFEDVPFHSSYAHSQSLDRLMNPLIDQYLYYLSRTQNQSGSAQNKDLGFSQGGPNTMANQAKNWLPGPCYRQQRVSKTKTDNNNSNFTWTGATKYHLNGRNSLANPGIAMASHKDDKDKFFPMSGILIFGKESAGASNTALDNVMLTSEEEIKTTNPVATEEYGIVAVNLQSSSTDPATGTVNSQGALPGMVWQNRDVYLQGPIWAKIPHTDGNFHPSPLMGGFGLKHPPPQILIKNTPVPADPPTTFNQSKLNSFITQYSTGQVSVEIEWELQKENSKRWNPEIQYTSNYAKSANVDFAVNTEGVYSEPRPIGTRYLTRNL

SEQ ID NO: 135 - protein, 737 aa, Adeno-Associated Virus
MAADGYLPDWLEDNLSEGIREWWALKPGAPKPKANQQKQDDGRGLVLPGYKYLGPFNGLDKGEPVNAADAAALEHDKAYDQQLQAGDNPYLRYNHADAEFQERLQEDTSFGGNLGRAVFQAKKRVLEPLGLVEEGAKTAPGKKRPVEPSPQRSPDSSTGIGKKGQQPARKRLNFGQTGDSESVPDPQPLGEPPAAPSGVGPNTMAAGGGAPMADNNEGADGVGSSSGNWHCDSTWLGDRVITTSTRTWALPTYNNHLYKQISSASTGASNDNTYFGYSTPWGYFDFNRFHCHFSPRDWQRLINNNWGFRPKRLSFKLFNIQVKEVTTNDGVTTIANNLTSTIQVFTDSEYQLPYVLGSAHQGCLPPFPADVFMIPQYGYLTLNNGSQAVGRSSFYCLEYFPSQMLRTGNNFQFTYTFEDVPFHSSYAHSQSLDRLMNPLIDQYLYYLSRTQNQSGSAQNKDLGFSRGSPAGMSVQAKNWLPGPCYRQQRVSKTKTDNNNSNFTWTGATKYHLNGRNSLANPGIAMASHKDDKDKFFPMSGILIFGKESAGASNTALDNVMLTSEEEIKTTNPVATEEYGIVAVNLQSSSTDPATGTVNSQGALPGMVWQNRDVYLQGPIWAKIPHTDGNFHPSPLMGGFGLKHPPPQILIKNTPVPADPPTTFNQSKLNSFITQYSTGQVSVEIEWELQKENSKRWNPEIQYTSNYAKSANVDFAVNTEGVYSEPRPIGTRYLTRNL

SEQ ID NO: 136 - protein, 737 aa, Adeno-Associated Virus
MAADGYLPDWLEDNLSEGIREWWALKPGAPKPKANQQKQDDGRGLVLPGYKYLGPFNGLDKGEPVNAADAAALEHDKAYDQQLQAGDNPYLRYNHADAEFQERLQEDTSFGGNLGRAVFQAKKRVLEPLGLVEEGAKTAPGKKRPVEPSPQRSPDSSTGIGKKGQQPARKRLNFGQTGDSESVPDPQPLGEPPAAPSGVGPNTMAAGGGAPMADNNEGADGVGSSSGNWHCDSTWLGDRVITTSTRTWALPTYNNHLYKQISSASTGASNDNTYFGYSTPWGYFDFNRFHCHFSPRDWQRLINNNWGFRPKRLSFKLFNIQVKEVTTNDGVTTIANNLTSTIQVFTDSEYQLPYVLGSAHQGCLPPFPADVFMIPQYGYLTLNNGSQAVGRSSFYCLEYFPSQMLRTGNNFQFTYTFEDVPFHSSYAHSQSLDRLMNPLIDQYLYYLNRTQNQSGSAQNKDLLFSRGSPAGMSVQPKNWLPGPCYRQQRVSKTKTDNNNSNFTWTGASKYNLNGRESIINPGTAMASHKDDKDKFFPMSGVMIFGKESAGASNTALDNVMITDEEEIKATNPVATERFGTVAVNLQSSSTDPATGDVHVMGALPGMVWQNRDVYLQGPIWAKIPHTDGNFHPSPLMGGFGLKHPPPQILIKNTPVPADPPTTFNQSKLNSFITQYSTGQVSVEIEWELQKENSKRWNPEIQYTSNYAKSANVDFAVNTEGVYSEPRPIGTRYLTRNL

SEQ ID NO: 137 - protein, 737 aa, Adeno-Associated Virus
MAADGYLPDWLEDNLSEGIREWWALKPGAPKPKANQQKQDDGRGLVLPGYKYLGPFNGLDKGEPVNAADAAALEHDKAYDQQLQAGDNPYLRYNHADAEFQERLQEDTSFGGNLGRAVFQAKKRVLEPLGLVEEGAKTAPGKKRPVEPSPQRSPDSSTGIGKKGQQPARKRLNFGQTGDSESVPDPQPLGEPPAAPSGVGPNTMAAGGGAPMADNNEGADGVGSSSGNWHCDSTWLGDRVITTSTRTWALPTYNNHLYKQISNSTSGGSSNDNTYFGYSTPWGYFDFNRFHCHFSPRDWQRLINNNWGFRPKRLSFKLFNIQVKEVTDNNGVKTIANNLTSTIQVFTDSEYQLPYVLGSAHQGCLPPFPADVFMIPQYGYLTLNDGSQAVGRSSFYCLEYFPSQMLRTGNNFQFTYTFEDVPFHSSYAHSQSLDRLMNPLIDQYLYYLSRTINGSGQNQQTLGFSVAGPANMAVQGRNWLPGPCYRQQRVSTTVTQNNNSEFAWPGGTKYHLNGRNSLANPGIAMATHKEGEDRFFPLSGILIFGKQGTGRDNVDADKVMLTSEEEIKTTNPVATEEYGIVATNHQSAQAQAQTGTVNSQGALPGMVWQNRDVYLQGPIWAKIPHTDGNFHPSPLMGGFGLKHPPPQILIKNTPVPADPPTTFNQSKLNSFITQYSTGQVSVEIEWELQKENSKRWNPEIQYTSNYYKSNNVEFAVNTEGVYSEPRPIGTRYLTRNL

SEQ ID NO: 138 - protein, 737 aa, Adeno-Associated Virus
MAADGYLPDWLEDNLSEGIREWWALKPGAPKPKANQQKQDDGRGLVLPGYKYLGPFNGLDKGEPVNAADAAALEHDKAYDQQLQAGDNPYLRYNHADAEFQERLQEDTSFGGNLGRAVFQAKKRVLEPLGLVEEGAKTAPGKKRPVEPSPQRSPDSSTGIGKKGQQPARKRLNFGQTGDSESVPDPQPLGEPPAAPSGVGPNTMAAGGGAPMADNNEGADGVGSSSGNWHCDSTWLGDRVITTSTRTWALPTYNNHLYKQISNSTSGGSSNDNTYFGYSTPWGYFDFNRFHCHFSPRDWQRLINNNWGFRPKRLSFKLFNIQVKEVTDNNGVKTIANNLTSTIQVFTDSEYQLPYVLGSAHQGCLPPFPADVFMIPQYGYLTLNDGSQAVGRSSFYCLEYFPSQMLRTGNNFQFTYTFEDVPFHSSYAHSQSLDRLMNPLIDQYLYYLSRTINGSGQNQQTLGFSVAGPTNMAVQGRNWLPGPCYRQQRVSTTVTQNNNSEFAWPGGTKYHLNGRNSLANPGIAMATHKEGEDRFFPLSGILIFGKQGTGRDNVDADKVMLTSEEEIKTTNPVATEEYGIVATNHQSAQAQAQTGTVNSQGALPGMVWQNRDVYLQGPIWAKIPHTDGNFHPSPLMGGFGLKHPPPQILIKNTPVPADPPTTFNQSKLNSFITQYSTGQVSVEIEWELQKENSKRWNPEIQYTSNYYKSNNVEFAVNTEGVYSEPRPIGTRYLTRNL

SEQ ID NO: 139 - protein, 737 aa, Adeno-Associated Virus
MAADGYLPDWLEDNLSEGIREWWALKPGAPKPKANQQKQDDGRGLVLPGYKYLGPFNGLDKGEPVNAADAAALEHDKAYDQQLQAGDNPYLRYNHADAEFQERLQEDTSFGGNLGRAVFQAKKRVLEPLGLVEEGAKTAPGKKRPVEPSPQRSPDSSTGIGKKGQQPARKRLNFGQTGDSESVPDPQPLGEPPAAPSGVGPNTMAAGGGAPMADNNEGADGVGSSSGNWHCDSTWLGDRVITTSTRTWALPTYNNHLYKQISNSTSGGSSNDNTYFGYSTPWGYFDFNRFHCHFSPRDWQRLINNNWGFRPKRLSFKLFNIQVKEVTDNNGVKTIANNLTSTIQVFTDSEYQLPYVLGSAHQGCLPPFPADVFMIPQYGYLTLNDGSQAVGRSSFYCLEYFPSQMLRTGNNFQFTYTFEDVPFHSSYAHSQSLDRLMNPLIDQYLYYLSRTINGSGQNQQTLGFSVAGPSNAAVQGRNWLPGPCYRQQRVSTTVTQNNNSEFAWPGGTKYHLNGRNSLANPGIAMATHKEGEDRFFPLSGILIFGKQGTGRDNVDADKVMLTSEEEIKTTNPVATEEYGIVATNHQSAQAQAQTGTVNSQGALPGMVWQNRDVYLQGPIWAKIPHTDGNFHPSPLMGGFGLKHPPPQILIKNTPVPADPPTTFNQSKLNSFITQYSTGQVSVEIEWELQKENSKRWNPEIQYTSNYYKSNNVEFAVNTEGVYSEPRPIGTRYLTRNL

SEQ ID NO: 140 - protein, 737 aa, Adeno-Associated Virus
MAADGYLPDWLEDNLSEGIREWWALKPGAPKPKANQQKQDDGRGLVLPGYKYLGPFNGLDKGEPVNAADAAALEHDKAYDQQLQAGDNPYLRYNHADAEFQERLQEDTSFGGNLGRAVFQAKKRVLEPLGLVEEGAKTAPGKKRPVEPSPQRSPDSSTGIGKKGQQPARKRLNFGQTGDSESVPDPQPLGEPPAAPSGVGPNTMAAGGGAPMADNNEGADGVGSSSGNWHCDSTWLGDRVITTSTRTWALPTYNNHLYKQISNSTSGGSSNDNTYFGYSTPWGYFDFNRFHCHFSPRDWQRLINNNWGFRPKRLSFKLFNIQVKEVTDNNGVKTIANNLTSTIQVFTDSEYQLPYVLGSAHQGCLPPFPADVFMIPQYGYLTLNDGSQAVGRSSFYCLEYFPSQMLRTGNNFQFTYTFEDVPFHSSYAHSQSLDRLMNPLIDQYLYYLSRTINGSGQNQQTLGFSVAGPSNIAVQGRNWLPGPCYRQQRVSTTVTQNNNSEFAWPGGTKYHLNGRNSLANPGIAMATHKEGEDRFFPLSGILIFGKQGTGRDNVDADKVMLTSEEEIKTTNPVATEEYGIVATNHQSAQAQAQTGTVNSQGALPGMVWQNRDVYLQGPIWAKIPHTDGNFHPSPLMGGFGLKHPPPQILIKNTPVPADPPTTFNQSKLNSFITQYSTGQVSVEIEWELQKENSKRWNPEIQYTSNYYKSNNVEFAVNTEGVYSEPRPIGTRYLTRNL

SEQ ID NO: 141 - protein, 737 aa, Adeno-Associated Virus
MAADGYLPDWLEDNLSEGIREWWALKPGAPKPKANQQKQDDGRGLVLPGYKYLGPFNGLDKGEPVNAADAAALEHDKAYDQQLQAGDNPYLRYNHADAEFQERLQEDTSFGGNLGRAVFQAKKRVLEPLGLVEEGAKTAPGKKRPVEPSPQRSPDSSTGIGKKGQQPARKRLNFGQTGDSESVPDPQPLGEPPAAPSGVGPNTMAAGGGAPMADNNEGADGVGSSSGNWHCDSTWLGDRVITTSTRTWALPTYNNHLYKQISNSTSGGSSNDNTYFGYSTPWGYFDFNRFHCHFSPRDWQRLINNNWGFRPKRLSFKLFNIQVKEVTDNNGVKTIANNLTSTIQVFTDSEYQLPYVLGSAHQGCLPPFPADVFMIPQYGYLTLNDGSQAVGRSSFYCLEYFPSQMLRTGNNFQFTYTFEDVPFHSSYAHSQSLDRLMNPLIDQYLYYLSRTINGSGQNQQTLGFSVAGPSNKAVQGRNWLPGPCYRQQRVSTTVTQNNNSEFAWPGGTKYHLNGRNSLANPGIAMATHKEGEDRFFPLSGILIFGKQGTGRDNVDADKVMLTSEEEIKTTNPVATEEYGIVATNHQSAQAQAQTGTVNSQGALPGMVWQNRDVYLQGPIWAKIPHTDGNFHPSPLMGGFGLKHPPPQILIKNTPVPADPPTTFNQSKLNSFITQYSTGQVSVEIEWELQKENSKRWNPEIQYTSNYYKSNNVEFAVNTEGVYSEPRPIGTRYLTRNL

SEQ ID NO: 142 - protein, 737 aa, Adeno-Associated Virus
MAADGYLPDWLEDNLSEGIREWWALKPGAPKPKANQQKQDDGRGLVLPGYKYLGPFNGLDKGEPVNAADAAALEHDKAYDQQLQAGDNPYLRYNHADAEFQERLQEDTSFGGNLGRAVFQAKKRVLEPLGLVEEGAKTAPGKKRPVEPSPQRSPDSSTGIGKKGQQPARKRLNFGQTGDSESVPDPQPLGEPPAAPSGVGPNTMAAGGGAPMADNNEGADGVGSSSGNWHCDSTWLGDRVITTSTRTWALPTYNNHLYKQISNSTSGGSSNDNTYFGYSTPWGYFDFNRFHCHFSPRDWQRLINNNWGFRPKRLSFKLFNIQVKEVTDNNGVKTIANNLTSTIQVFTDSEYQLPYVLGSAHQGCLPPFPADVFMIPQYGYLTLNDGSQAVGRSSFYCLEYFPSQMLRTGNNFQFTYTFEDVPFHSSYAHSQSLDRLMNPLIDQYLYYLSRTINGSGQNQQTLGFSVAGASNMAVQGRNWLPGPCYRQQRVSTTVTQNNNSEFAWPGGTKYHLNGRNSLANPGIAMATHKEGEDRFFPLSGILIFGKQGTGRDNVDADKVMLTSEEEIKTTNPVATEEYGIVATNHQSAQAQAQTGTVNSQGALPGMVWQNRDVYLQGPIWAKIPHTDGNFHPSPLMGGFGLKHPPPQILIKNTPVPADPPTTFNQSKLNSFITQYSTGQVSVEIEWELQKENSKRWNPEIQYTSNYYKSNNVEFAVNTEGVYSEPRPIGTRYLTRNL

SEQ ID NO: 143 - protein, 736 aa, Adeno-Associated Virus
MAADGYLPDWLEDNLSEGIREWWDLKPGAPKPKANQQKQDDGRGLVLPGYKYLGPFNGLDKGEPVNAADAAALEHDKAYDQQLKAGDNPYLRYNHADAEFQERLQEDTSFGGNLGRAVFQAKKRVLEPLGLVEEGAKTAPGKKRPVEQSPQEPDSSSGIGKTGQQPAKKRLNFGQTGDSESVPDPQPLGEPPAAPSGVGSNTMASGGGAPMADNNEGADGVGNSSGNWHCDSTWLGDRVITTSTRTWALPTYNNHLYKQISNSTSGGSSNDNTYFGYSTPWGYFDFNRFHCHFSPRDWQRLINNNWGFRPKRLNFKLFNIQVKEVTDNNGVKTIANNLTSTVQVFTDSEYQLPYVLGSAHQGCLPPFPADVFMIPQYGYLTLNDGSQAVGRSSFYCLEYFPSQMLRTGNNFQFSYTFEDVPFHSSYAHSQSLDRLMNPLIDQYLYFLSRTINGSGQNQQTLQFSQAGPSSMANQARNWVPGPCYRQQRVSTTVTQNNNSEFAWPGATKYHLNGRDSLMNPGVAMASHKEGEDRFFPLSGVLIFGKQGTGRDNVDADKVMITNEEEIKTTNPVATEEYGAVATNHQRGNRQAQTGLVHNQGVLPGMVWQNRDVYLQGPIWAKIPHTDGNFHPSPLMGGFGLKHPPPQILIKNTPVPADPPTTFNQAKLNSFITQYSTGQVSVEIEWELQKENSKRWNPEIQYTSNYYKSNNVEFAVNTEGVYSEPRPIGTRFLTRNL

SEQ ID NO: 144 - protein, 734 aa, Adeno-Associated Virus
MAADGYLPDWLEDNLSEGIREWWALKPGAPKPKANQQKQDDGRGLVLPGYKYLGPFNGLDKGEPVNAADAAALEHDKAYDQQLQAGDNPYLRYNHADAEFQERLQEDTSFGGNLGRAVFQAKKRVLEPLGLVEEGAKTAPGKKRPVEPSPQRSPDSSTGIGKKGQQPARKRLNFGQTGDSESVPDPQPLGEPPAAPSGVGPNTMAAGGGAPMADNNEGADGVGSSSGNWHCDSTWLGDRVITTSTRTWALPTYNNHLYKQIKSGSVDGSNDNTYFGYSTPWGYFDFNRFHCHFSPRDWQRLINNNWGFRPKRLSFKLFNIQVKEVTVQDSTTTIANNLTSTIQVFTDSEYQLPYVLGSAHQGCLPPFPADVFMIPQYGYLTLNRDNTENPTERSSFYCLEYFPSQMLRTGNNFQFTYTFEDVPFHSSYAHSQSLDRLMNPLIDQYLYYLSRTNTGGVQFSQGGPNTMANQAKNWLPGPCYRQQGWNLGSGVNRASVSAFATGTKYHLNGRNSLANPGIAMATNNLQGSNTYALENTLIFNSQPANPGTTATYLEGNMLTSEEEIKTTNPVATEEYGIVATNNQSSTTAPATGTVNSQGALPGMVWQNRDVYLQGPIWAKIPHTDGNFHPSPLMGGFGLKHPPPQILIKNTPVPADPPTTFNQSKLNSFITQYSTGQVSVEIEWELQKENSKRWNPEIQYTSNYNDPQFVDFAVNTEGVYSEPRPIGTRYLTRNL

SEQ ID NO: 145 - protein, 733 aa, Adeno-Associated Virus
MAADGYLPDWLEDNLSEGIREWWDLKPGAPKPKANQQKQDDGRGLVLPGYKYLGPFNGLDKGEPVNAADAAALEHDKAYDQQLKAGDNPYLRYNHADAEFQERLQEDTSFGGNLGRAVFQAKKRVLEPLGLVEEGAKTAPGKKRPVEQSPQEPDSSSGIGKTGQQPAKKRLNFGQTGDSESVPDPQPLGEPPAAPSGVGSNTMASGGGAPMADNNEGADGVGNSSGNWHCDSTWLGDRVITTSTRTWALPTYNNHLYKQIKSGSVDGSNDNTYFGYSTPWGYFDFNRFHCHFSPRDWQRLINNNWGFRPKRLNFKLFNIQVKEVTVQDSTTTIANNLTSTVQVFTDSEYQLPYVLGSAHQGCLPPFPADVFMIPQYGYLTLNRDNTENPTERSSFYCLEYFPSQMLRTGNNFQFSYTFEDVPFHSSYAHSQSLDRLMNPLIDQYLYFLSRTNTGGVQFSQAGPSSMANQARNWVPGPCYRQQGWNLGSGVNRASVSAFATATKYHLNGRDSLMNPGVAMASNNLQGSNTYALENTLIFNSQPANPGTTATYLEGNMITNEEEIKTTNPVATEEYGAVATNNQSSTTAPATGLVHNQGVLPGMVWQNRDVYLQGPIWAKIPHTDGNFHPSPLMGGFGLKHPPPQILIKNTPVPADPPTTFNQAKLNSFITQYSTGQVSVEIEWELQKENSKRWNPEIQYTSNYNDPQFVDFAVNTEGVYSEPRPIGTRFLTRNL

SEQ ID NO: 146 - protein, 737 aa, Adeno-Associated Virus; identical to SEQ ID NO: 134

SEQ ID NO: 147 - protein, 737 aa, Adeno-Associated Virus; identical to SEQ ID NO: 135

SEQ ID NO: 148 - protein, 737 aa, Adeno-Associated Virus; identical to SEQ ID NO: 136

SEQ ID NO: 149 - protein, 737 aa, Adeno-Associated Virus
MAADGYLPDWLEDNLSEGIREWWALKPGAPKPKANQQKQDDGRGLVLPGYKYLGPFNGLDKGEPVNAADAAALEHDKAYDQQLQAGDNPYLRYNHADAEFQERLQEDTSFGGNLGRAVFQAKKRVLEPLGLVEEGAKTAPGKKRPVEPSPQRSPDSSTGIGKKGQQPARKRLNFGQTGDSESVPDPQPLGEPPAAPSGVGPNTMAAGGGAPMADNNEGADGVGSSSGNWHCDSTWLGDRVITTSTRTWALPTYNNHLYKQISSETAGSTNDNTYFGYSTPWGYFDFNRFHCHFSPRDWQRLINNNWGFRPKRLSFKLFNIQVKEVTTNDGVTTIANNLTSTIQVFTDSEYQLPYVLGSAHQGCLPPFPADVFMIPQYGYLTLNNGSQAVGRSSFYCLEYFPSQMLRTGNNFQFTYTFEDVPFHSSYAHSQSLDRLMNPLIDQYLYYLSRTQSNPGGTAGNRELGFSQGGPSTMAEQAKNWLPGPCYRQQRVSKTLDQNNNSNFAWTGATKYHLNGRNSLANPGIAMATHKDDEDRFFPSSGILIFGKTGATNKTTLENVMLTSEEEIKTTNPVATEEYGIVSSNLQAANTAAQTGTVNSQGALPGMVWQNRDVYLQGPIWAKIPHTDGNFHPSPLMGGFGLKHPPPQILIKNTPVPADPPTTFNQSKLNSFITQYSTGQVSVEIEWELQKENSKRWNPEIQYTSNFEKQTGVDFAVNTEGVYSEPRPIGTRYLTRNL

SEQ ID NO: 150 - protein, 737 aa, Adeno-Associated Virus
MAADGYLPDWLEDNLSEGIREWWALKPGAPKPKANQQKQDDGRGLVLPGYKYLGPFNGLDKGEPVNAADAAALEHDKAYDQQLQAGDNPYLRYNHADAEFQERLQEDTSFGGNLGRAVFQAKKRVLEPLGLVEEGAKTAPGKKRPVEPSPQRSPDSSTGIGKKGQQPARKRLNFGQTGDSESVPDPQPLGEPPAAPSGVGPNTMAAGGGAPMADNNEGADGVGSSSGNWHCDSTWLGDRVITTSTRTWALPTYNNHLYKQISSETAGSTNDNTYFGYSTPWGYFDFNRFHCHFSPRDWQRLINNNWGFRPKRLSFKLFNIQVKEVTTNDGVTTIANNLTSTIQVFTDSEYQLPYVLGSAHQGCLPPFPADVFMIPQYGYLTLNNGSQAVGRSSFYCLEYFPSQMLRTGNNFQFTYTFEDVPFHSSYAHSQSLDRLMNPLIDQYLYYLARTQSNPGGTAGNRELQFYQGGPSTMAEQAKNWLPGPCFRQQRVSKTLDQNNNSNFAWTGATKYHLNGRNSLVNPGVAMATHKDDEDRFFPSSGVLIFGKTGATNKTTLENVLMTNEEEIRPTNPVATEEYGIVSSNLQAANTAAQTQVVNNQGALPGMVWQNRDVYLQGPIWAKIPHTDGNFHPSPLMGGFGLKHPPPQILIKNTPVPADPPTTFNQSKLNSFITQYSTGQVSVEIEWELQKENSKRWNPEIQYTSNFEKQTGVDFAVNTEGVYSEPRPIGTRYLTRNL

SEQ ID NO: 151 - protein, 737 aa, Adeno-Associated Virus; identical to SEQ ID NO: 133

SEQ ID NO: 152 - protein, 737 aa, Adeno-Associated Virus
MAADGYLPDWLEDNLSEGIREWWDLKPGAPKPKANQQKQDDGRGLVLPGYKYLGPFNGLDKGEPVNAADAAALEHDKAYDQQLKAGDNPYLRYNHADAEFQERLQEDTSFGGNLGRAVFQAKKRVLEPLGLVEEGAKTAPGKKRPVEQSPQEPDSSSGIGKTGQQPAKKRLNFGQTGDSESVPDPQPLGEPPAAPSGVGSNTMASGGGAPMADNNEGADGVGNSSGNWHCDSTWLGDRVITTSTRTWALPTYNNHLYKQISNGTSGGATNDNTYFGYSTPWGYFDFNRFHCHFSPRDWQRLINNNWGFRPKRLNFKLFNIQVKEVTQNEGTKTIANNLTSTVQVFTDSEYQLPYVLGSAHQGCLPPFPADVFMIPQYGYLTLNNGSQAVGRSSFYCLEYFPSQMLRTGNNFQFSYTFEDVPFHSSYAHSQSLDRLMNPLIDQYLYFLSRTQTTGGTANTQTLQFSQGGPNTMANQARNWVPGPCYRQQRVSTTTGQNNNSNFAWTAATKYHLNGRDSLMNPGVAMASHKDDEERFFPSNGVLIFGKQNAARDNADYSDVMITNEEEIKTTNPVATEEYGAVADNLQQQNTAPQIGLVHNQGVLPGMVWQNRDVYLQGPIWAKIPHTDGNFHPSPLMGGFGLKHPPPQILIKNTPVPADPPTTFNQAKLNSFITQYSTGQVSVEIEWELQKENSKRWNPEIQYTSNYYKSTSVDFAVNTEGVYSEPRPIGTRFLTRNL

SEQ ID NO: 153 - protein, 738 aa, Adeno-Associated Virus
MAADGYLPDWLEDNLSEGIREWWDLKPGAPKPKANQQKQDNGRGLVLPGYKYLGPFNGLDKGEPVNAADAAALEHDKAYDQQLKAGDNPYLRYNHADAEFQERLQEDTSFGGNLGRAVFQAKKRVLEPLGLVEEGAKTAPAKKRPVEPSPQRSPDSSTGIGKKGQQPARKRLNFGQTGDSESVPDPQPLGEPPAAPSSVGSGTVAAGGGAPMADNNEGADGVGNASGNWHCDSTWLGDRVITTSTRTWALPTYNNHLYKQISNGTSGGSTNDNTYFGYSTPWGYFDFNRFHCHFSPRDWQRLINNNWGFRPKKLRFKLFNIQVKEVTQNEGTKTIANNLTSTIQVFSDSEYQLPYVLGSAHQGCLPPFPADVFMIPQYGYLTLNNGSQSVGRSSFYCLEYFPSQMLRTGNNFEFSYSFEDVPFHSSYAHSQSLDRLMNPLIDQYLYYLARTQSTGGTAGTQQLQFYQGGPSTMAEQAKNWLPGPCFRQQRVSTTLSQNNNSNFAWTGATKYHLNGRNSLVNPGVAMATHKDDEERFFPSSGVLIFGKQGAGKDNVDYSSVLMTNEEEIRPTNPVATEEYGIVADNLQQQNAAPIVQVVNNQGALPGMVWQNRDVYLQGPIWAKIPHTDGNFHPSPLMGGFGLKHPPPQILIKNTPVPANPPEVFTPAKFASFITQYSTGQVSVEIEWELQKENSKRWNPEIQYTSNYYKSTNVDFAVDSQGVYSEPRPIGTRYLTRNL

SEQ ID NO: 154 - protein, 738 aa, Adeno-Associated Virus
MAADGYLPDWLEDNLSEGIREWWDLKPGAPKPKANQQKQDNGRGLVLPGYKYLGPFNGLDKGEPVNAADAAALEHDKAYDQQLKAGDNPYLRYNHADAEFQERLQEDTSFGGNLGRAVFQAKKRVLEPLGLVEEGAKTAPAKKRPVEPSPQRSPDSSTGIGKKGQQPARKRLNFGQTGDSESVPDPQPLGEPPAAPSSVGSGTVAAGGGAPMADNNEGADGVGNASGNWHCDSTWLGDRVITTSTRTWALPTYNNHLYKQISNGTSGGSTNDNTYFGYSTPWGYFDFNRFHCHFSPRDWQRLINNNWGFRPKKLRFKLFNIQVKEVTQNEGTKTIANNLTSTIQVFSDSEYQLPYVLGSAHQGCLPPFPADVFMIPQYGYLTLNNGSQSVGRSSFYCLEYFPSQMLRTGNNFEFSYSFEDVPFHSSYAHSQSLDRLMNPLIDQYLYYLARTQSTGGTAGTQQLQFYQAGPNNMSAQAKNWLPGPCFRQQRVSTTLSQNNNSNFAWTGATKYHLNGRNSLVNPGVAMATHKDDEERFFPSSGVLIFGKQGAGKDNVDYSSVLMTNEEEIRPTNPVATEEYGIVADNLQQQNAAPIVQVVNNQGALPGMVWQNRDVYLQGPIWAKIPHTDGNFHPSPLMGGFGLKHPPPQILIKNTPVPANPPEVFTPAKFASFITQYSTGQVSVEIEWELQKENSKRWNPEIQYTSNYYKSTNVDFAVDSQGVYSEPRPIGTRYLTRNL

SEQ ID NO: 155 - protein, 738 aa, Adeno-Associated Virus
MAADGYLPDWLEDNLSEGIREWWDLKPGAPKPKANQQKQDNGRGLVLPGYKYLGPFNGLDKGEPVNAADAAALEHDKAYDQQLKAGDNPYLRYNHADAEFQERLQEDTSFGGNLGRAVFQAKKRVLEPLGLVEEGAKTAPAKKRPVEPSPQRSPDSSTGIGKKGQQPARKRLNFGQTGDSESVPDPQPLGEPPAAPSSVGSGTVAAGGGAPMADNNEGADGVGNASGNWHCDSTWLGDRVITTSTRTWALPTYNNHLYKQISNGTSGGSTNDNTYFGYSTPWGYFDFNRFHCHFSPRDWQRLINNNWGFRPKKLRFKLFNIQVKEVTQNEGTKTIANNLTSTIQVFSDSEYQLPYVLGSAHQGCLPPFPADVFMIPQYGYLTLNNGSQSVGRSSFYCLEYFPSQMLRTGNNFEFSYSFEDVPFHSSYAHSQSLDRLMNPLIDQYLYYLSRTQSTGGTAGTQQLLFSQAGPNNMSAQAKNWLPGPCYRQQRVSTTLSQNNNSNFAWTGATKYHLNGRDSLVNPGVAMATHKDDEERFFPSSGVLMFGKQGAGKDNVDYSSVMLTSEEEIKTTNPVATEQYGVVADNLQQQNAAPIVGAVNSQGALPGMVWQNRDVYLQGPIWAKIPHTDGNFHPSPLMGGFGLKHPPPQILIKNTPVPANPPEVFTPAKFASFITQYSTGQVSVEIEWELQKENSKRWNPEIQYTSNYYKSTNVDFAVDSQGVYSEPRPIGTRYLTRNL

SEQ ID NO: 156 - protein, 737 aa, Adeno-Associated Virus
MAADGYLPDWLEDNLSEGIREWWALKPGAPQPKANQQHQDNARGLVLPGYKYLGPGNGLDKGEPVNAADAAALEHDKAYDQQLKAGDNPYLKYNHADAEFQERLKEDTSFGGNLGRAVFQAKKRLLEPLGLVEEAAKTAPGKKRPVEQSPQEPDSSAGIGKSGAQPAKKRLNFGQTGDTESVPDPQPIGEPPAAPSGVGSLTMASGGGAPVADNNEGADGVGSSSGNWHCDSQWLGDRVITTSTRTWALPTYNNHLYKQISNGTSGGSTNDNAYFGYSTPWGYFDFNRFHCHFSPRDWQRLINNNWGFRPKRLNFKLFNIQVKEVTQNEGTKTIANNLTSTVQVFTDSDYQLPYVLGSAHEGCLPPFPADVFMIPQYGYLTLNNGSQAVGRSSFYCLEYFPSQMLRTGNNFQFSYEFENVPFHSSYAHSQSLDRLMNPLIDQYLYYLSKTISTGGTAGTQQLKFSVAGPSNMAVQGRNYIPGPSYRQQRVSTTLSQNNNSNFAWTGASSWALNGRNSLMNPGPAMATHKDDEERFFPSSGSLIFGKQGAGKDNVDYSSVMITNEEEIKTTNPVATESYGQVADNLQQQNAAPIVGWVQNQGILPGMVWQDRDVYLQGPIWAKIPHTDGNFHPSPLMGGFGMKHPPPQILIKNTPVPADPPTAFNKDKLNSFITQYSTGQVSVEIEWELQKENSKRWNPEIQYTSNYYKSTNVDFAVNTEGVYSEPRPIGTRYLTRNL

SEQ ID NO: 157 - protein, 737 aa, Adeno-Associated Virus
MAADGYLPDWLEDNLSEGIREWWALKPGAPQPKANQQHQDNARGLVLPGYKYLGPGNGLDKGEPVNAADAAALEHDKAYDQQLKAGDNPYLKYNHADAEFQERLKEDTSFGGNLGRAVFQAKKRLLEPLGLVEEAAKTAPGKKRPVEQSPQEPDSSAGIGKSGAQPAKKRLNFGQTGDTESVPDPQPIGEPPAAPSGVGSLTMASGGGAPVADNNEGADGVGSSSGNWHCDSQWLGDRVITTSTRTWALPTYNNHLYKQISNGTSGGSTNDNAYFGYSTPWGYFDFNRFHCHFSPRDWQRLINNNWGFRPKRLNFKLFNIQVKEVTQNEGTKTIANNLTSTVQVFTDSDYQLPYVLGSAHEGCLPPFPADVFMIPQYGYLTLNNGSQAVGRSSFYCLEYFPSQMLRTGNNFQFSYEFENVPFHSSYAHSQSLDRLMNPLIDQYLYYLSRTQSTGGTAGTQQLLFSQAGPNNMSAQAKNWLPGPCYRQQRVSTTLSQNNNSNFAWTGATKYHLNGRDSLVNPGVAMATHKDDEERFFPSSGVLMFGKQGAGKDNVDYSSVMLTSEEEIKTTNPVATEQYGVVADNLQQQNAAPIVGAVNSQGALPGMVWQDRDVYLQGPIWAKIPHTDGNFHPSPLMGGFGMKHPPPQILIKNTPVPADPPTAFNKDKLNSFITQYSTGQVSVEIEWELQKENSKRWNPEIQYTSNYYKSTNVDFAVNTEGVYSEPRPIGTRYLTRNL

SEQ ID NO: 158 - protein, 742 aa, Papio
  MISC_FEATURE: Bba.45
  MISC_FEATURE (1)..(742): VP1 Caspid Protein
  MISC_FEATURE (138)..(742): VP2 Caspid Protein
  MISC_FEATURE (206)..(742): VP3 Caspid Protein
MAADGYLPDWLEDNLSEGIREWWALKPGAPQPKANRQHQDNARGLVLPGYKYLGPGNGLDKGEPVNEADAAALEHDKAYDQQLKSGDNPYLKYNHADAEFQQRLATDTSFGGNLGKAVFQAKKRILEPLGLVEEGVKTAPGKKRPLEKTPNRPTNPDSGKAPAKKKQKDGETADSARRALDFEDSGAGDGPPEGSSSGEMSHDAEMRAAPGGNAVEAGQGADGVGNASGDWHCDSTWSEGRVTTTSTRTWVLPTYNNHLYLRIGTTANSNTYNGFSTPWGYFDFNRFHCHFSPRDWQRLINNNWGLRPKSMRVKIFNIQVREVTTSNGETTVANNLTSTVQIFADSTYELPYVMDAGQEGSLPPFPNDVFMVPQYGYCGVVTGENQNQTDRNAFYCLEYFPSQMLRTGNNFEISYQFEKVPFHSMYAHSQSLDRMMNPLLDQYLWHLQSTTTGNSLNQGTATTTYGKITTGDFAYYRKNWLPGACIKQQKFSKNASQNYKIPASGGDALLKYDTHTTLNGRWSNMAPGPPMATAGAGDSDFSNSQLIFAGPNQSGNTTTSSNNLLFTSEEEIATTNPRDTDMFGQIADNNQNATTAPHIANLDAMGIVPGMVWQNRDIYYQGPIWAKVPHTDGHFHPSPLMGGFGLKHPPPQIFIKNTPVPANPNTTFSAARINSFLTQYSTGQVAVQIDWEIQKEHSKRWNPEVQFTSNYGTQNSMLWAPDNAGNYHEPRAIGSRFLTHHL

SEQ ID NO: 159 - protein, 742 aa, Papio
  MISC_FEATURE: Bba.46
  MISC_FEATURE (1)..(742): VP1 Caspid Protein
  MISC_FEATURE (138)..(742): VP2 Caspid Protein
  MISC_FEATURE (206)..(742): VP3 Caspid Protein
MAADGYLPDWLEDNLSEGIREWWALKPGAPQPKANQQHQDNARGLVLPGYKYLGPGNGLDKGEPVNEADAAALEHDKAYDQQLKSGDNPYLKYNHADAEFQQRLATDTSFGGNLGKAVFQAKKRILEPLGLVEEGVKTAPGKKRPLEKTPNRPTNPDSGKAPAKKKQKDGETADSARRTLDFEDSGAGDGPPEGSSSGEMSHDAEMRAAPGGNAVEAGQGADGVGNASGDWHCDSTWSEGRVTTTSTRTWVLPTYNNHLYLRIGTTANSNTYNGFSTPWGCFDFNRFHCHFSPRDWQRLINNNWGLRPKSMRVKIFNIQVKEVTTSNGETTVANNLTSTVQIFADSTYELPYVMDAGQEGSLPPFPNDVFMVPQYGYCGVVTGENQNQTDRNAFYCLEYFPSQMLRTGNNFEISYQFEKVPFHSMYAHSQSLDRMMNPLLDQYLWHLQSTTTGNSLNQGAATTTYGKITTGDFAYYRKNWLPGACIKQQKFSKNASQNYKIPASGGDALLKYDTHTTLNGRWSNMAPGPPMATAGAGDSDFSNSQLIFAGPNQSGNTTTSSNNLLFTSEEEIATTNPRDTDMFGQIADNNQNATTAPHIANLDAMGIVPGMVWQNRDIYYQGPIWAKVPHTDGHFHPSPLMGGFGLKHPPPQIFIKNTPVPANPNTTFSAARINSFLTQYSTGQVAVQIDWEIQKEHSKRWNPEVQFTSNYGTQNSMLWAPDNAGNYHEPRAIGSRFLTHHL

SEQ ID NO: 160 - protein, 742 aa, Papio
  MISC_FEATURE: Bba.47
  MISC_FEATURE (1)..(742): VP1 Caspid Protein
  MISC_FEATURE (138)..(742): VP2 Caspid Protein
  MISC_FEATURE (206)..(742): VP3 Caspid Protein
MAADGYLPDWLEDNLSEGIREWWALKPGAPQPKANQQHQDNARGLVLPGYKYLGPGNGLDKGEPVNEADAAALEHDKAYDQQLKSGDNPYLKYNHADAEFQQRLATDTSFGGNLGKAVFQAKKRILEPLGLVEEGVKTAPGKKRPLEKTPNRPTNPDSGKAPAKKKQKDGETADSARRTLDFEDSGAGDGPPEGSSSGEMSHDAEMRAAPGGNAVEAGQGADGVGNASGDWHCDSTWSEGRVTTTSTRTWVLPTYNNHLYLRIGTTANSNTYNGFSTPWGYFDFNRFHCHFSPRDWQRLINNNWGLRPKSMRVKIFNIQVKEVTTSNGETTVANNLTSTVQIFADSTYELPYVMDAGQEGSLPPFPNDVFMVPQYGYCGVVTGENQNQTDRNAFYCLEYFPSQMLRTGNNFEISYQFEKVPFHSMYAHSQSLDRMMNPLLDQYLWHLQSTTTGNSLNQGTATTTYGKITTGDFAYYRKNWLPGACIKQQKFSKNASQNYKIPASGGDALLKYDTHTTLNGRWSNMAPGPPMATAGAGDSDFSNSQLIFAGPNQSGNTTTSSNNLLFTSEEEIATTNPRDTDMFGQIADNNQNATTAPHIANLDAMGIVPGMVWQNRDIYYQGPIWAKVPHTDGHFHPSPLMGGFGLKHPPPQIFIKNTPVPANPNTTFSAARINSFLTQYSTGQVAVQIDWEIQKEHSKRWNPEVQFTSNYGTQNSMLWAPDNAGNYHEPRAIGSRFLTHHL

SEQ ID NO: 161 - protein, 742 aa, Papio
  MISC_FEATURE: Bba.48
  MISC_FEATURE (1)..(742): VP1 Caspid Protein
  MISC_FEATURE (138)..(742): VP2 Caspid Protein
  MISC_FEATURE (206)..(742): VP3 Caspid Protein
MAADGYLPDWLEDNLSEGIREWWALKPGAPQPKANQQHQDNARGLVLPGYKYLGPGNGLDKGEPVNEADAAALEHDKAYDQQLKSGDNPYLKYNHADAEFQERLQEDTSFGGNLGRAVFQAKKRILEPLGLVEEGVKTAPGKKRPLEKTPNRPTNPDSGKAPAKKKQKDGETADSARRTLDFEDSGAGDGPPEGSSSGEMSHDAEMRAAPGGNAVEAGQGADGVGNASGDWHCDSTWSEGRVTTTSTRTWVLPTYNNHLYLRIGTTANSNTYNGFSTPWGYFDFNRFHCRFSPRDWQRLINNNWGLRPKSMRVKIFNIQVKEVTTSNGETTVANNLTSTVQIFADSTYELPYVMDAGQEGSLPPFPNDVFMVPQYGYCGVVTGENQNQTDRNAFYCLEYFPSQMLRTGNNFEISYQFEKVPFHSMYAHSQSLDRMMNPLLDQYLWHLQSTTTGNSLNQGTAITTYGKITTGDFAYYRKNWLPGACIKQQKFSKNASQNYKIPASGGDALLKYDTHTTLNGRWSNMAPGPPMATAGAGDSDFSNSQLIFAGPNQSGNTTTSSNNLLFTSEEEIATTNPRDTDMFGQIADNNQNAATAPHIANLDAMGIVPGMVWQNRDIYYQGPIWAKVPHTDGHFHPSPLMGGFGLKHPPPQIFIKNTPVPANPNTTFSAARINSFLTQYSTGQVAVQIDWEIQKEHSKRWNPEVQFTSNYGTQNSMLWAPDNAGNYHEPRAIGSRFLTHHL

SEQ ID NO: 162 - protein, 742 aa, Papio
  MISC_FEATURE: Bba.49
  MISC_FEATURE (1)..(742): VP1 Caspid Protein
  MISC_FEATURE (138)..(742): VP2 Caspid Protein
  MISC_FEATURE (206)..(742): VP3 Caspid Protein
MAADGYLPDWLEDNLSEGIREWWALKPGAPQPKANQQHQDNARGLVLPGYKYLGPGNGLDKGEPVNEADAAALEHDKAYDQQLKSGDNPYLKYNHADAEFQERLQEDTSFGGNLGRAVFQAKKRILEPLGLVEEGVKTAPGKKRPLEKTPNRPTNPDSGKAPAKKKQKDGETADSARRTLDFEDSGAGDGPPEGSSSGEMSHDAEMRAAPGGNAVEAGQGADGVGNASGDWHCDSTWSEGRVTTTSTRTWVLPTYNNHLYLRIGTTANSNTYNGFSTPWGYFDFNRFHCHFSPRDWQRLINNNWGLRPKSMRVKIFNIQVKEVTTSNGETTVANNLTSTVQIFADSTYELPYVMDAGQEGSLPPFPNDVFMVPQYGYCGVVTGENQNQTDRNAFYCLEYFPSQMLRTGNNFEISYQFEKVPFHSMYAHSQSLDRMMNPLLDQYLWHLQSTTTGNSLNQGTAITTYGKITTGDFAYYRKNWLPGAGIKQQKFSKNASQNYKIPASGGDALLKYDTHTTLNGRWSNMAPGPPMATAGAGDSDFSNSQLIFAGPNQSGNTTTSSNNLLFTSEEEIATTNPRDTDMFGQIADNNQNATTAPHIANLDAMGIVPGMVWQNRDIYYQGPIWAKVPHTDGHFHPSPLMGGFGLKHPPPQIFIKNTPVPANPNTTFSAARINSFLTQYSTGQVAVQIDWEIQKEHSKRWNPEVQFTSNYGTQNSMLWAPDNAGNYHEPRAIGSRFLTHHL

SEQ ID NO: 163 - protein, 742 aa, Papio
  MISC_FEATURE: Bba.50
  MISC_FEATURE (1)..(742): VP1 Caspid Protein
  MISC_FEATURE (138)..(742): VP2 Caspid Protein
  MISC_FEATURE (206)..(742): VP3 Caspid Protein
MAADGYLPDWLEDNLSESIREWWALKPGAPRPKANQQHQDDARGLVLPGYKYLGPGNGLDKGEPVNEADAAALEHDKAYDQQLKSGDNPYLKYNHADAEFQQRLATDTSFGGNLGKAVFQAKKRILEPLGLVEEGVKTAPGRKRPLEKTPNRPTNPDSGKAPAKKKQKDGETADSARRTLDFEDSGAGDGPPEGSSSGEMSHDAEMRAAPGGNAVEAGQGADGVGNASGDWHCDSTWSEGRVTTTSTRTWVLPTYNNHLYLRIGTTANSNTYNGFSTPWGYFDFNRFHCHFSPRDWQRLINNNWGLRPKSMRVKIFNIQVKEVTTSNGETTVANNLTSTVQIFADSTYELPYVMDAGQEGSLPPFPNDVFMVPQYGYCGVVTGENQNQTDRNAFYCLEYFPSQMLRTGNNFEISYQFEKVPLHSMYAHSQSLDRMMNPLLDQYLWHLQSTTTGNSLNQGTATTTYGKITTGDFAYYRKNWLPGACIKQQKFSKNASQNYKIPASGEDALLKYDTHTTLNGRWSNMAPGPPMATAGAGDSDFSNSQLIFAGPNQSGNTTTSSNNLLFTSEEEIATTNPRDTDMFGQIADNNQNATTAPHIANLDAMGIVPGMVWQNRDIYYQGPIWAKVPHTDGHFHPSPLMGGFGLKHPPPQIFIKNTPVPANPNTTFSAARINSFLTQYSTGQVAVQIDWEIQKEHSKRWNPEVQFTSNYGTQNSMLWAPDNAGNYHEPRAIGSRFLTHHL

SEQ ID NO: 164 - protein, 742 aa, Papio; identical to SEQ ID NO: 160
  MISC_FEATURE: Bba.51
  MISC_FEATURE (1)..(742): VP1 Caspid Protein
  MISC_FEATURE (138)..(742): VP2 Caspid Protein
  MISC_FEATURE (206)..(742): VP3 Caspid Protein

SEQ ID NO: 165 - DNA, 2229 bp, Papio
  misc_feature: Bba.45
atggctgctgacggttatcttccagattggctcgaggacaacctctctgaaggcattcgcgagtggtgggcgctgaaacctggagccccacagcccaaggcaaatcgacaacatcaagacaacgctcggggtcttgtgcttccgggttacaaatacttgggacccggtaacggactcgacaagggagagccggtcaacgaggcagacgccgcggccctcgagcacgacaaggcctacgaccagcagctcaagtcgggagacaacccgtacctcaagtacaaccacgcggacgccgagttccagcagcgcttggcgaccgacacctcttttgggggcaacctcggcaaggcagtcttccaggccaaaaagaggattctcgagcctctgggtctggttgaagagggcgttaaaacggctcctggaaagaaacgcccattagaaaagactccaaatcggccgaccaacccggactctgggaaggccccggccaagaaaaagcaaaaagacggcgagacagccgactctgctagaagggcactcgactttgaagactctggagcaggagacggaccccctgagggatcatcttccggagaaatgtctcatgatgctgagatgcgtgcggcgccaggcggaaatgctgtcgaggcgggacaaggtgccgatggagtgggtaatgcctccggtgattggcattgcgattccacctggtcagagggccgagtcaccaccaccagcacccgaacctgggtcctgcccacctacaacaaccacctgtacctgcgaatcggaacaacggccaacagcaacacctacaatggattctccaccccctggggatactttgactttaaccgcttccactgccacttttccccacgcgactggcagcgactcatcaacaacaactggggactcaggccgaaatcgatgcgtgttaaaatcttcaacatccaggtcagggaggtcactacgtcaaacggcgagactacggtcgctaataaccttaccagcacggttcagatctttgcggattcaacgtatgaactcccatacgtgatggacgccggtcaggaggggagccttcctccgttccccaacgacgtgtttatggttccccaatacgggtactgcggagtcgtcactggagaaaaccagaaccaaacagacagaaatgccttttactgtctggagtactttccatcccaaatgctaagaactggcaacaactttgaaatcagttaccaatttgaaaaagttcctttccattcaatgtacgcgcacagccagagcctggacagaatgatgaatcctttgctggatcagtacctgtggcatctgcaatcgaccactaccggaaattcccttaatcaaggaacagctaccaccacgtacgggaaaattaccactggggactttgcctactacaggaaaaactggttacctggagcctgcattaaacaacaaaaattttcaaagaatgccagtcaaaactacaagattcccgccagcgggggagacgcccttttaaagtatgacacgcataccactttaaatgggcgatggagtaacatggctcctggtcctccaatggccaccgcaggtgccggggactcggattttagcaacagccagctgatctttgccggacccaatcagagcggtaacacgaccacgtcttcaaacaatttgttgtttacctcagaagaggagattgccacaacaaacccacgagacacggacatgtttggacagattgcagataataatcaaaatgccaccaccgcccctcacatcgctaacctggacgctatgggaattgttcccggaatggtctggcaaaacagagacatctactaccagggccctatttgggccaaggtccctcacacggacggacactttcacccttcgccgctgatgggaggatttggactgaaacacccgcctccgcagattttcatcaaaaacacccccgtacccgccaatcccaatactacctttagcgctgcaaggatcaattcttttttgacgcagtacagcaccggacaagtcgccgttcagatcgactgggaaattcagaaggagcactccaaacgctggaatcccgaagtccaatttacttcaaactacggcactcaaaattctatgctgtgggctcccgacaacgccggcaactaccacgaaccccgggctattgggtcccgtttcctcacccaccacttgtaa

SEQ ID NO: 166 - DNA, 2229 bp, Papio
  misc_feature: Bba.46
atggctgctgacggttatcttccagattggctcgaggacaacctctctgaaggcattcgcgagtggtgggcgctgaaacctggagccccacagcccaaggcaaatcaacaacatcaagacaacgctcggggtcttgtgcttccgggttacaaatacttgggacccggtaacggactcgacaagggagagccggtcaacgaggcagacgccgcggccctcgagcacgacaaggcctacgaccagcagctcaagtcgggagacaacccgtacctcaagtacaaccacgcggacgccgagttccagcagcgcttggcgaccgacacctcttttgggggcaacctcggcaaggcagtcttccaggccaaaaagaggattctcgagcctctgggtctggttgaagagggcgttaaaacggctcctggaaagaaacgcccattagaaaagactccaaatcggccgaccaacccggactctgggaaggccccggccaagaaaaagcaaaaagacggcgagacagccgactctgctagaaggacactcgactttgaagactctggagcaggagacggaccccctgagggatcatcttccggagaaatgtctcatgacgctgagatgcgtgcggcgccaggcggaaatgctgtcgaggcgggacaaggtgccgatggagtgggtaatgcctccggtgattggcattgcgattccacctggtcagagggccgagtcaccaccaccagcacccgaacctgggtcctgcccacctacaacaaccacctgtacctgcgaatcggaacaacggccaacagcaacacctacaatggattctccaccccctggggatgctttgactttaaccgcttccactgccacttttccccacgcgactggcagcgactcatcaacaacaactggggactcaggccgaaatcgatgcgtgttaaaatcttcaacatccaggtcaaggaggtcactacgtcaaacggcgagactacggtcgctaataaccttaccagcacggttcagatctttgcggattcaacgtatgaactcccatacgtgatggacgccggtcaggaggggagccttcctccgttccccaacgacgtgtttatggttccccaatacgggtactgcggagtcgtcactggagaaaaccagaaccaaacagacagaaatgccttttactgtctggagtactttccatcccaaatgctaagaactggcaacaactttgaaatcagttaccaatttgaaaaagttcctttccattcaatgtacgcgcacagccagagcctggacagaatgatgaatcctttgctggatcagtacctgtggcatctgcaatcgaccactaccggaaattcccttaatcaaggagcagctaccaccacgtacgggaaaattaccactggggactttgcctactacaggaaaaactggttgcctggagcctgcattaaacaacaaaaattttcaaagaatgccagtcaaaactacaagatccccgccagcgggggagacgcccttttaaagtatgacacgcataccactttaaatgggcgatggagtaacatggctcctggtcctccaatggccaccgcaggtgccggggactcggattttagcaacagccagctgatctttgccggacccaatcagagcggtaacacgaccacgtcttcaaacaatttgttgtttacctcagaagaggagattgccacaacaaacccacgagacacggacatgtttggacagattgcagataataatcaaaatgccaccaccgcccctcacatcgctaacctggacgctatgggaattgttcccggaatggtctggcaaaacagagacatctactaccagggccctatttgggccaaggtccctcacacggacggacactttcacccttcgccgctgatgggaggatttggactgaaacacccgcctccgcagattttcatcaaaaacacccccgtacccgccaatcccaatactacctttagcgctgcaaggatcaattcttttttgacgcagtacagcaccggacaagtcgccgttcagatcgactgggaaattcagaaggagcactccaaacgctggaatcccgaagtccaatttacttcaaactacggcactcaaaattctatgctgtgggctcccgacaacgccggcaactaccacgaaccccgggctattgggtcccgtttcctcacccaccacttgtaa

SEQ ID NO: 167 - DNA, 2229 bp, Papio
  misc_feature: Bba.47
atggctgctgacggttatcttccagattggctcgaggacaacctctctgaaggcattcgcgagtggtgggcgctgaaacctggagccccacagcccaaggcaaatcaacaacatcaagacaacgctcggggtcttgtgcttccgggttacaaatacttgggacccggtaacggactcgacaagggagagccggtcaacgaggcagacgccgcggccctcgagcacgacaaggcctacgaccagcagctcaagtcgggagacaacccgtacctcaagtacaaccacgcggacgccgagttccagcagcgcttggcgaccgacacctcttttgggggcaacctcggcaaggcagtcttccaggccaaaaagaggattctcgagcctctgggtctggttgaagagggcgttaaaacggctcctggaaagaaacgcccattagaaaagactccaaatcggccgaccaacccggactctgggaaggccccggccaagaaaaagcaaaaagacggcgagacagccgactctgctagaaggacactcgactttgaagactctggagcaggagacggacctcctgagggatcatcttccggagaaatgtctcatgatgctgagatgcgtgcggcgccaggcggaaatgctgtcgaggcgggacaaggtgccgatggagtgggtaatgcctccggtgattggcattgcgattccacctggtcagagggccgagtcaccaccaccagcacccgaacctgggtcctgcccacctacaacaaccacctgtacctgcgaatcggaacaacggccaacagcaacacctacaatggattctccaccccctggggatactttgactttaaccgcttccactgccacttttccccacgcgactggcagcgactcatcaacaacaactggggactcaggccgaaatcgatgcgtgttaaaatcttcaacatccaggtcaaggaggtcactacgtcaaacggcgagactacggtcgctaataaccttaccagcacggttcagatctttgcggattcaacgtatgaactcccatacgtgatggacgccggtcaggaggggagccttcctccgttccccaacgacgtgtttatggttccccaatacgggtactgcggagtcgtcactggagaaaaccagaaccaaacagacagaaatgccttttactgtctggagtactttccatcccaaatgctaagaactggcaacaactttgaaatcagttaccaatttgaaaaagttcctttccattcaatgtacgcgcacagccagagcctggacagaatgatgaatcctttgctggatcagtacctgtggcatctgcaatcgaccactaccggaaattcccttaatcaaggaacagctaccaccacgtacgggaaaattaccactggggactttgcctactacaggaaaaactggttgcctggagcctgcattaaacaacaaaaattttcaaagaatgccagtcaaaactacaagattcccgccagcgggggagacgcccttttaaagtatgacacgcataccactttaaatgggcgatggagtaacatggctcctggtcctccaatggccaccgcaggtgccggggactcggattttagcaacagccagctgatctttgccggacccaatcagagcggtaacacgaccacgtcttcaaacaatttgttgtttacctcagaagaggagattgccacaacaaacccacgagacacggacatgtttgggcagattgcagataataatcaaaatgccaccaccgcccctcacatcgctaacctggacgctatgggaattgttcccggaatggtctggcaaaacagagacatctactaccagggccctatttgggccaaggtccctcacacggacggacactttcacccttcgccgctgatgggaggatttggactgaaacacccgcctccgcagattttcatcaaaaacacccccgtacccgccaatcccaatactacctttagcgctgcaaggatcaattcttttttgacgcagtacagcaccggacaagtcgccgttcagatcgactgggaaattcagaaggagcactccaaacgctggaatcccgaagtccaatttacttcaaactacggcactcaaaattctatgctgtgggctcccgacaacgccggcaactaccacgaaccccgggctattgggtcccgtttcctcacccaccacttgtaa

SEQ ID NO: 168 - DNA, 2229 bp, Papio
  misc_feature: Bba.48
atggctgctgacggttatcttccagattggctcgaggacaacctctctgaaggcattcgcgagtggtgggcgctgaaacctggagccccacagcccaaggcaaatcaacaacatcaagacaacgctcggggtcttgtgcttccgggttacaaatacttgggacccggtaacggactcgacaagggagagccggtcaacgaggcagacgccgcggccctcgagcacgacaaggcctacgaccagcagctcaagtcgggagacaacccgtacctcaagtacaaccacgcggacgccgagtttcaggagcgtcttcaagaagatacgtcttttgggggcaacctcgggcgagcagtcttccaggccaaaaagaggattctcgagcctctgggtctggttgaagagggcgttaaaacggctcctggaaagaaacgcccattagaaaagactccaaatcggccgaccaacccggactctgggaaggccccggccaagaaaaagcaaaaagacggcgagacagccgactctgctagaaggacactcgactttgaagactctggagcaggagacggaccccctgagggatcatcttccggagaaatgtctcatgatgctgagatgcgtgcggcgccaggcggaaatgctgtcgaggcgggacaaggtgccgatggagtgggtaatgcctccggtgattggcattgcgattccacctggtcagagggccgagtcaccaccaccagcacccgaacctgggtcctgcccacctacaacaaccacctgtacctgcgaatcggaacaacggccaacagcaacacctacaatggattctccaccccctggggatactttgactttaaccgcttccactgccgcttttccccgcgcgactggcagcgactcatcaacaacaactggggactcaggccgaaatcgatgcgtgttaaaatcttcaacatccaggtcaaggaggtcactacgtcaaacggcgagactacggtcgctaataaccttaccagcacggttcagatctttgcggattcaacgtatgaactcccatacgtgatggacgccggtcaggaggggagccttcctccgttccccaacgacgtgtttatggttccccaatacgggtactgcggagtcgtcactggagaaaaccagaaccaaacagacagaaatgccttttactgtctggagtactttccatcccaaatgctaagaactggcaacaactttgaaatcagttaccaatttgaaaaagttcctttccattcaatgtacgcgcacagccagagcctggacagaatgatgaatcctttgctggatcagtacctgtggcatctgcaatcgaccactaccggaaattcccttaatcaaggaacagctatcaccacgtacgggaaaattaccactggggactttgcctactacaggaaaaactggttgcctggagcctgcattaaacaacaaaaattttcaaagaatgccagtcaaaactacaagattcccgccagcgggggagacgcccttttaaagtatgacacgcataccactttaaatgggcgatggagtaacatggctcctggtcctccaatggccaccgcaggtgccggggactcggattttagcaacagccagctgatctttgccggacccaatcagagcggtaacacgaccacgtcttcaaacaatttgttgtttacctcagaagaggagattgccacaacaaacccacgagacacggacatgtttggacagattgcagataataatcaaaatgccgccaccgcccctcacatcgctaacctggacgctatgggaattgttcccggaatggtctggcaaaacagagacatctactaccagggccctatttgggccaaggtccctcacacggacggacactttcacccttcgccgctgatgggaggatttggactgaaacacccgcctccgcagattttcatcaaaaacacccccgtacccgccaatcccaatactacctttagcgctgcaaggatcaattcttttttgacgcagtacagcaccggacaagtcgccgttcagatcgactgggaaattcagaaggagcactccaaacgctggaatcccgaagtccaatttacttcaaactacggcactcaaaattctatgctgtgggctcccgacaacgccggcaactaccacgaaccccgggctattgggtcccgtttcctcacccaccacttgtaa

SEQ ID NO: 169 - DNA, 2229 bp, Papio
  misc_feature: Bba. 49
atggctgctgacggttatcttccagattggctcgaggacaacctctctgaaggcattcgcgagtggtgggcgctgaaacctggagccccacagcccaaggcaaatcaacaacatcaagacaacgctcggggtcttgtgcttccgggttacaaatacttgggacccggtaacggactcgacaagggagagccggtcaacgaggcagacgccgcggccctcgagcacgacaaggcctacgaccagcagctcaagtcgggagacaacccgtacctcaagtacaaccacgcggacgccgagtttcaggagcgtcttcaagaagatacgtcttttgggggcaacctcgggcgagcagtcttccaggccaaaaagaggattctcgagcctctgggtctggttgaagagggcgttaaaacggctcctggaaagaaacgcccattagaaaagactccaaatcggccgaccaacccggactctgggaaggccccggccaagaaaaagcaaaaagacggcgagacagccgactctgctagaaggacactcgactttgaagactctggagcaggagacggaccccctgagggatcatcttccggagaaatgtctcatgatgctgagatgcgtgcggcgccaggcggaaatgctgtcgaggcgggacaaggtgccgatggagtgggtaatgcctccggtgattggcattgcgattccacctggtcagagggccgagtcaccaccaccagcacccgaacctgggtcctgcccacctacaacaaccacctgtacctgcgaatcggaacaacggccaacagcaacacctacaatggattctccaccccctggggatactttgactttaaccgcttccactgccacttttccccacgcgactggcagcgactcatcaacaacaactggggactcaggccgaaatcgatgcgtgttaaaatcttcaacatccaggtcaaggaggtcactacgtcaaacggcgagactacggtcgctaataaccttaccagcacggttcagatctttgcggattcaacgtatgaactcccatacgtgatggacgccggtcaggaggggagccttcctccgttccccaacgacgtgtttatggttccccaatacgggtactgcggagtcgtcactggagaaaaccagaaccaaacagacagaaatgccttttactgtctggagtactttccatcccaaatgctaagaactggcaacaactttgaaatcagttaccaatttgaaaaagttcctttccattcaatgtacgcgcacagccagagcctggacagaatgatgaatcctttgctggatcagtacctgtggcatctgcaatcgaccactaccggaaattcccttaatcaaggaacagctatcaccacgtacgggaaaattaccactggggactttgcctactacaggaaaaactggttgcctggagccggcattaaacaacaaaaattttcaaagaatgccagtcaaaactacaagattcccgccagcgggggagacgcccttttaaagtatgacacgcataccactttaaatgggcgatggagtaacatggctcctggtcctccaatggccaccgcaggtgccggggactcggattttagcaacagccagctgatctttgccggacccaatcagagcggtaacacgaccacgtcttcaaacaatttgttgtttacctcagaagaggagattgccacaacaaacccacgagacacggacatgtttggacagattgcagataataatcaaaatgccaccaccgcccctcacatcgctaacctggacgctatgggaattgttcccggaatggtctggcaaaacagagacatctactaccagggccctatttgggccaaggtccctcacacggacggacactttcacccttcgccgctgatgggaggatttggactgaaacacccgcctccgcagattttcatcaaaaacacccccgtacccgccaatcccaatactacctttagcgctgcaaggatcaattcttttttgacgcagtacagcaccggacaagtcgccgttcagatcgactgggaaattcagaaggagcactccaaacgctggaatcccgaagtccaatttacttcaaactacggcactcaaaattctatgctgtgggctcccgacaacgccggcaactaccacgaaccccgggctattgggtcccgtttcctcacccaccacttgtaa

SEQ ID NO: 170 - DNA, 2229 bp, Papio
  misc_feature: Bba.50
atggctgctgacggttatcttccagattggctcgaggacaacctctctgaaagcattcgcgagtggtgggcgctgaaacctggagccccacggcccaaggcaaatcaacaacatcaagacgacgctcggggtcttgtgcttccgggttacaaatacttgggacccggtaacggactcgacaagggagagccggtcaacgaggcagacgccgcggccctcgagcacgacaaggcctacgaccagcagctcaagtcgggagacaacccgtacctcaagtacaaccacgcggacgccgagttccagcagcgcttggcgaccgacacctcttttgggggcaacctcggcaaggcagtcttccaggccaaaaagaggattctcgagcctctgggtctggttgaagagggcgttaaaacggctcctggaaggaaacgcccattagaaaagactccaaatcggccgaccaacccggactctgggaaggccccggccaagaaaaagcaaaaagacggcgagacagccgactctgctagaaggacactcgactttgaagactctggagcaggagacggaccccctgagggatcatcttccggagaaatgtctcatgatgctgagatgcgtgcggcgccaggcggaaatgctgtcgaggcgggacaaggtgccgatggagtgggtaatgcctccggtgattggcattgcgattccacctggtcagagggccgagtcaccaccaccagcacccgaacctgggtcctgcccacctacaacaaccacctgtacctgcgaatcggaacaacggccaacagcaacacctacaatggattctccaccccctggggatactttgactttaaccgcttccactgccacttttccccacgcgactggcagcgactcatcaacaacaactggggactcaggccgaaatcgatgcgtgttaaaatcttcaacatccaggtcaaggaggtcactacgtcaaacggcgagactacggtcgctaataaccttaccagcacggttcagatctttgcggattcaacgtatgaactcccatacgtgatggacgccggtcaggaggggagccttcctccgttccccaacgacgtgtttatggttccccaatacgggtactgcggagtcgtcactggagaaaaccagaaccaaacagacagaaatgccttttactgtctggagtactttccatcccaaatgctaagaactggcaacaactttgaaatcagttaccaatttgaaaaagttcctctccattcaatgtacgcgcacagccagagcctggacagaatgatgaatcctttgctggatcagtacctgtggcatctgcaatcgaccactaccggaaattcccttaatcaaggaacagctaccaccacgtacgggaaaattaccactggggactttgcctactacaggaaaaactggttgcctggagcctgcattaaacaacaaaaattttcaaagaatgccagtcaaaactacaagattcccgccagcggggaagacgcccttttaaagtatgacacgcataccactttaaatgggcgatggagtaacatggctcctggtcctccaatggccaccgcaggtgccggggactcggattttagcaacagccagctgatctttgccggacccaatcagagcggtaacacgaccacgtcttcaaacaatttgttgtttacctcagaagaggagattgccacaacaaacccacgagacacggacatgtttggacagattgcagataataatcaaaatgccaccaccgcccctcacatcgctaacctggacgctatgggaattgttcccggaatggtctggcaaaacagagacatctactaccagggccctatctgggccaaggtccctcacacggacggacactttcacccttcgccgctgatgggaggatttggactgaaacacccgcctccgcagattttcatcaaaaacacccccgtacccgccaatcccaatactacctttagcgctgcaaggatcaattcttttttgacgcagtacagcaccggacaagtcgccgttcagatcgactgggaaattcagaaggagcactccaaacgctggaatcccgaagtccaatttacttcaaactacggcactcaaaattctatgctgtgggctcccgacaacgccggcaactaccacgaaccccgggctattgggtcccgtttcctcacccaccacttgtaa

SEQ ID NO: 171 - DNA, 2229 bp, Papio
  misc_feature: Bba.51
atggctgctgacggttatcttccagattggctcgaggacaacctctctgaaggcattcgcgagtggtgggcgctgaaacctggagccccacagcccaaggcaaatcaacaacatcaagacaacgctcggggtcttgtgcttccgggttacaaatacttgggacccggtaacggactcgacaagggagagccggtcaacgaggcagacgccgcggccctcgagcacgacaaggcctacgaccagcagctcaagtcgggagacaacccgtacctcaagtacaaccacgcggacgccgagttccagcagcgcttggcgaccgacacctcttttgggggcaacctcggcaaggcagtcttccaggccaaaaagaggattctcgagcctctgggtctggttgaagagggcgttaaaacggctcctggaaagaaacgcccattagaaaagactccaaatcggccgaccaacccggactctgggaaggccccggccaagaaaaagcaaaaagacggcgagacagccgactctgctagaaggacactcgactttgaagactctggagcaggagacggaccccctgagggatcatcttccggagaaatgtctcatgatgctgagatgcgtgcggcgccaggcggaaatgctgtcgaggcgggacaaggtgccgatggagtgggtaatgcctccggtgattggcattgcgattccacctggtcagagggccgagtcaccaccaccagcacccgaacctgggtcctgcccacctacaacaaccacctgtacctgcgaatcggaacaacggccaacagcaacacctacaatggattctccaccccctggggatactttgactttaaccgcttccactgccacttttccccacgcgactggcagcgactcatcaacaacaactggggactcaggccgaaatcgatgcgtgttaaaatcttcaacatccaggtcaaggaggtcactacgtcaaacggcgagactacggtcgctaataaccttaccagcacggttcagatctttgcggattcaacgtatgaactcccatacgtgatggacgccggtcaggaggggagccttcctccgttccccaacgacgtgtttatggttccccaatacgggtactgcggagtcgtcactggagaaaaccagaaccaaacagacagaaatgccttttactgtctggagtactttccatcccaaatgctaagaactggcaacaactttgaaatcagttaccaatttgaaaaagttcctttccattcaatgtacgcgcacagccagagcctggacagaatgatgaatcctttgctggatcagtacctgtggcatctgcaatcgaccactaccggaaattcccttaatcaaggaacagctaccaccacgtacgggaaaattaccactggggactttgcctactacaggaaaaactggttgcctggagcctgcattaaacaacaaaaattttcaaagaatgccagtcaaaactacaagattcccgccagcgggggagacgcccttttaaagtatgacacgcataccactttaaatgggcgatggagtaacatggctcctggtcctccaatggccaccgcaggtgccggggactcggattttagcaacagccagctgatctttgccggacccaatcagagcggtaacacgaccacgtcttcaaacaatttgttgtttacctcagaagaggagattgccacaacaaacccacgagacacggacatgtttggacagattgcagataataatcaaaatgccaccaccgcccctcacatcgctaacctggacgctatgggaattgttcccggaatggtctggcaaaacagagacatctactaccagggccctatttgggccaaggtccctcacacggacggacactttcacccttcgccgctgatgggaggatttggactgaaacacccgcctccgcagattttcatcaaaaacacccccgtacccgccaatcccaatactacctttagcgctgcaaggatcaattcttttttgacgcagtacagcaccggacaagtcgccgttcagatcgactgggaaattcagaaggagcactccaaacgctggaatcccgaagtccaatttacttcaaactacggcactcaaaattctatgctgtgggctcccgacaacgccggcaactaccacgaaccccgggctattgggtcccgtttcctcacccaccacttgtaa

SEQ ID NO: 172 - protein, 12 aa, Artificial Sequence
  Synthetic Peptide
LLEPADNPFLPQ

SEQ ID NO: 173 - protein, 736 aa, Adeno-Associated Virus
MAADGYLPDWLEDNLSEGIREWWALQPGAPKPKANQQHQDNARGLVLPGYKYLGPGNGLDKGEPVNAADAAALEHDKAYDQQLKAGDNPYLKYNHADAEFQERLKEDTSFGGNLGRAVFQAKKRLLEPLGLVEEAAKTAPGKKRPVDQSPQEPDSSSGVGKSGKQPARKRLNFGQTGDSESVPDPQPLGEPPAAPTSLGSNTMASGGGAPMADNNEGADGVGNSSGNWHCDSQWLGDRVITTSTRTWALPTYNNHLYKQISSQSGASNDNHYFGYSTPWGYFDFNRFHCHFSPRDWQRLINNNWGFRPKKLSFKLFNIQVKEVTQNDGTTTIANNLTSTVQVFTDSEYQLPYVLGSAHQGCLPPFPADVFMVPQYGYLTLNNGSQAVGRSSFYCLEYFPSQMLRTGNNFQFSYTFEDVPFHSSYAHSQSLDRLMNPLIDQYLYYLNRTQGTTSGTTNQSRLLFSQAGPQSMSLQARNWLPGPCYRQQRLSKTANDNNNSNFPWTAASKYHLNGRDSLVNPGPAMASHKDDEEKFFPMHGNLIFGKEGTTASNAELDNVMITDEEEIRTTNPVATEQYGTVANNLQSSNTAPTTRTVNDQGALPGMVWQDRDVYLQGPIWAKIPHTDGHFHPSPLMGGFGLKHPPPQIMIKNTPVPANPPTTFSPAKFASFITQYSTGQVSVEIEWELQKENSKRWNPEIQYTSNYNKSVNVDFTVDTNGVYSEPRPIGTRYLTRPL
